(19) United States
(12) Patent Application Publication
(10) Pub. No.: US 2006/0041949 A1
(43) Pub. Date: Feb. 23, 2006

(54) Nicotiana nucleic acid molecules and uses thereof

(75) Inventors: Dongmei Xu, Lexington, KY (US); Mark T. Nielsen, Nicholasville, KY (US)

Correspondence Address: CLARK & ELBING LLP, 101 FEDERAL STREET, BOSTON, MA, 02110, US

(73) Assignee: U.S. Smokeless Tobacco, Greenwich, CT (US)

(21) Appl. No.: 11/116,881

(22) Filed: Apr. 27, 2005

Related U.S. Application Data
(63) Continuation-in-part of application No. PCT/US04/34065, filed on Oct. 15, 2004.
(63) Continuation-in-part of application No. 10/934,944, filed on Sep. 3, 2004.
Application No. 10/934,944 is a continuation-in-part of application No. 10/686,947, filed on Oct. 16, 2003.
(63) Continuation-in-part of application No. PCT/US04/34218, filed on Oct. 15, 2004.
(63) Continuation-in-part of application No. 10/943,507, filed on Sep. 17, 2004.
Application No. 10/943,507 is a continuation-in-part of application No. 10/686,947, filed on Oct. 16, 2003.
(63) Continuation-in-part of application No. 11/110,062, filed on Apr. 19, 2005.
Application No. 11/110,062 is a continuation-in-part of application No. 10/934,944, filed on Sep. 3, 2004.
Application No. 11/110,062 is a continuation-in-part of application No. 10/943,507, filed on Sep. 17, 2004.
Application No. 10/943,507 is a continuation-in-part of application No. 10/686,947, filed on Oct. 16, 2003.
Application No. 10/943,507 is a continuation-in-part of application No. 10/387,346, filed on Mar. 12, 2003.
Application No. 10/387,346 is a continuation-in-part of application No. 10/340,861, filed on Jan. 10, 2003.
Application No. 10/340,861 is a continuation-in-part of application No. 10/293,252, filed on Nov. 13, 2002.
(60) Provisional application No. 60/665,451, filed on Mar. 24, 2005.
(60) Provisional application No. 60/665,097, filed on Mar. 24, 2005.
(60) Provisional application No. 60/646,764, filed on Jan. 25, 2005.
(60) Provisional application No. 60/607,357, filed on Sep. 3, 2004.
(60) Provisional application No. 60/566,235, filed on Apr. 29, 2004.
(60) Provisional application No. 60/566,235, filed on Apr. 29, 2004.
(60) Provisional application No. 60/566,235, filed on Apr. 29, 2004.
(60) Provisional application No. 60/503,989, filed on Sep. 18, 2003.
(60) Provisional application No. 60/485,368, filed on Jul. 8, 2003.
(60) Provisional application No. 60/418,933, filed on Oct. 16, 2002.
(60) Provisional application No. 60/363,684, filed on Mar. 12, 2002.
(60) Provisional application No. 60/347,444, filed on Jan. 11, 2002.
(60) Provisional application No. 60/337,684, filed on Nov. 13, 2001.

(51) Int. Cl. A01H 1/00; A01H 5/00; C12N 15/82; C12N 15/87

(52) U.S. Cl. 800/278; 800/317.3

(57) ABSTRACT

The present invention features Nicotiana nucleic acid sequences such as sequences encoding constitutive, or ethylene or senescence induced polypeptides, in particular cytochrome p450 enzymes, in Nicotiana plants and methods for using these nucleic acid sequences and plants to alter desirable traits, for example by using breeding protocols.

### CROSS-REFERENCE TO RELATED APPLICATIONS

[0001] This application claims the benefit of U.S. Provisional Application No. 60/665,451, filed Mar. 24, 2005, U.S. Provisional Application No. 60/665,097, filed Mar. 24, 2005, U.S. Provisional Application No. 60/646,764, filed Jan. 25, 2005, U.S. Provisional Application No. 60/607,357, filed Sep. 3, 2004, and U.S. Provisional Application No. 60/566,235, filed Apr. 29, 2004.

[0002] This application is also a continuation-in-part application of U.S. application Ser. No. 10/934,944 filed Sep. 3, 2004 and U.S. application Ser. No. 10/943,507, filed Sep. 17, 2004, both of which claim the benefit of U.S. Provisional Application No. 60/503,989, filed Sep. 18, 2003, U.S. Provisional Application No. 60/485,368, filed Jul. 8, 2003, and U.S. Provisional Application No. 60/418,933, filed Oct. 16, 2002, and which are also a continuation-in-part of U.S. application Ser. No. 10/686,947, filed Oct. 16, 2003, which is a continuation-in-part of U.S. application Ser. No. 10/387,346, filed Mar. 12, 2003, which is a continuation-in-part of U.S. application Ser. No. 10/340,861, filed Jan. 10, 2003, which is a continuation-in-part of U.S. application Ser. No. 10/293,252, filed Nov. 13, 2002, which claims the benefit of U.S. Provisional Application No. 60/363,684, filed Mar. 12, 2002, U.S. Provisional Application No. 60/347,444, filed Jan. 11, 2002, and U.S. Provisional Application No. 60/337,684, filed on Nov. 13, 2001. All the applications listed herein are incorporated herein by reference.

[0003] The present invention relates to Nicotiana nucleic acid sequences such as sequences encoding constitutive, or ethylene or senescence induced polypeptides, in particular cytochrome p450 enzymes (hereinafter referred to as p450 and p450 enzymes), in Nicotiana plants and methods for using these nucleic acid sequences to alter plant phenotypes.

### BACKGROUND

[0004] During tobacco ripening or curing the expression of various genes is altered. Such genes may affect metabolic pathways involved in the formation of numerous secondary metabolites including terpenoids, polyphenols, and alkaloids that affect end-product quality traits. For example, the bioconversion of nicotine to form nornicotine during plant senescence and in the post-harvest or leaf curing phase occurs in many Nicotiana species. Nicotine is the predominant source of nornicotine. The nornicotine alkaloid, is a substrate for microbe-mediated nitrosation to form the tobacco specific nitrosamine (TSNA) N′-nitrosonornicotine (NNN) during leaf curing or subsequent leaf storage and processing.

[0005] Genes expressed during tobacco ripening or curing may be constitutively expressed, ethylene-induced or senescence-related genes, for instance, genes encoding a cytochrome p450. Cytochrome p450s, for example, catalyze enzymatic reactions for a diverse range of chemically dissimilar substrates that include the oxidative, peroxidative, and reductive metabolism of endogenous and xenobiotic substrates. In plants, p450s participate in biochemical pathways that include the synthesis of plant products such as phenylpropanoids, alkaloids, terpenoids, lipids, cyanogenic glycosides, and glucosinolates studied (Chappell, Annu. Rev. Plant Physiol. Plant Mol. Biol. 46:521-547, 1995). Cytochrome p450s, also known as p450 heme-thiolate proteins, usually act as terminal oxidases in multi-component electron transfer chains, called p450-containing monooxygenase systems. Specific reactions catalyzed by these enzyme systems include demethylation, hydroxylation, epoxidation, N-oxidation, sulfooxidation, N—, S—, and O-dealkylations, desulfation, deamination, and reduction of azo, nitro, and N-oxide groups.

[0006] The diverse role of Nicotiana plant p450 enzymes has been implicated in effecting a variety of plant metabolites such as phenylpropanoids, alkaloids, terpenoids, lipids, cyanogenic glycosides, glucosinolates, and a host of other chemical entities. Some p450 enzymes can impact the composition of plant metabolites. For example, it has been long desired to improve the flavor and aroma of certain plants by altering a plant's profile of selected fatty acids through breeding; however very little is known about mechanisms involved in controlling the levels of these leaf constituents. The down regulation or up regulation of p450 enzymes associated with the modification of fatty acids may facilitate accumulation of desired fatty acids that provide more preferred leaf phenotypic qualities.

[0007] The function of p450 enzymes and their broadening roles in plant constituents is still being discovered. For instance, a special class of p450 enzymes was found to catalyze the breakdown of fatty acid into volatile C6- and C9-aldehydes and β-alcohols that are major contributors of “fresh green” odor of fruits and vegetables. The level of other novel targeted p450s may be altered to enhance the qualities of leaf constituents by modifying lipid composition and related breakdown metabolites in Nicotiana leaf. Several of these constituents in leaf are affected by senescence that stimulates the maturation of leaf quality properties. Still other reports have shown that p450s enzymes are play a functional role in altering fatty acids that are involved in plant-pathogen interactions and disease resistance.

[0008] The large multiplicity of p450 enzyme forms, their differing structure and function have made their research on Nicotiana p450 enzymes very difficult before the present invention. In addition, cloning of p450 enzymes has been hampered at least in part because these membrane-localized proteins are typically present in low abundance and often unstable during purification. Hence, a need exists for the identification of p450 enzymes in plants and the nucleic acid sequences associated with those p450 enzymes. In particular, only a few cytochrome p450 proteins have been reported in Nicotiana. The inventions described herein entail the discovery of cytochrome 450s and cytochrome p450 fragments that correspond to several groups of p450 species based on their sequence identity.

[0009] In addition to the p450 sequences, the present invention encompasses the discovery of other constitutive and ethylene or senescence induced sequences that address the need for regulating metabolic pathways involved in the formation of secondary metabolites that affect the quality of a tobacco product. These sequences are also useful in the development of plant germplasms that have desirable traits for use in breeding programs to develop more desirable germplasms, and especially non-GMO (genetically modified organism) type germplasms.

### SUMMARY OF THE INVENTION

[0010] The present inventors have identified and characterized constitutive, and ethylene and senescene induced sequences, including a genomic clone of nicotine demethylase, from tobacco. Also described herein is the use of these sequences in breeding methods and in methods to create a plant (e.g., a transgenic plant) having desirable traits, such as altered levels of nornicotine or N′-nitrosonornicotine (“NNN”) or both relative to a control plant.

[0011] In one aspect, the invention features a breeding method for producing a tobacco plant having decreased expression of a nicotine demethylase gene, the method including the steps of: (a) providing a first tobacco plant having variant nicotine demethylase gene expression; (b) providing a second tobacco plant that contains at least one phenotypic trait; (c) crossing the first tobacco plant with the second tobacco plant to produce an F1 progeny plant; (d) collecting seed of the F1 progeny for the variant nicotine demethylase gene expression; and (e) germinating the seed to produce a tobacco plant having decreased expression of the nicotine demethylase gene.

[0012] In one embodiment, a tobacco plant is identified as variant for nicotine demethylase gene expression (e.g., at the transcriptional, post transcriptional, or translational levels or at the level of enzymatic activity) using the sequences described herein and standard methods known in the art.

[0013] In another embodiment of this breeding method, the first tobacco plant includes an endogenous nicotine demethylase gene having a mutation (e.g., a deletion, substitution, point mutation, translocation, inversion, duplication, or an insertion). In another embodiment, the first tobacco plant includes a nicotine demethylase gene having a null mutation, includes a recombinant gene that silences an endogenous nicotine demethylase gene, or includes a nicotine demethylase having reduced or altered enzymatic activity. In yet another embodiment, the nicotine demethylase gene of the first tobacco plant is absent. In still another embodiment, the first tobacco plant is a transgenic plant.

[0014] Exemplary first tobacco plants useful in the breeding methods disclosed herein include Nicotiana africana, Nicotiana amplexicaulis, Nicotiana arentsii, Nicotiana benthamiana, Nicotiana bigelovii, Nicotiana corymbosa, Nicotiana debneyi, Nicotiana excelsior, Nicotiana exigua, Nicotiana glutinosa, Nicotiana goodspeedii, Nicotiana gossei, Nicotiana hesperis, Nicotiana ingulba, Nicotiana knightiana, Nicotiana maritima, Nicotiana megalosiphon, Nicotiana miersii, Nicotiana nesophila, Nicotiana noctiflora, Nicotiana nudicaulis, Nicotiana otophora, Nicotiana palmeri, Nicotiana paniculata, Nicotiana petunioides, Nicotiana plumbaginifolia, Nicotiana repanda, Nicotiana rosulata, Nicotiana rotundifolia, Nicotiana rustica, Nicotiana setchelli, Nicotiana stocktonii, Nicotiana eastii, Nicotiana suaveolens or Nicotiana trigonophylla. Desirably the first tobacco plant is Nicotiana amplexicaulis, Nicotiana benthamiana, Nicotiana bigelovii, Nicotiana debneyi, Nicotiana excelsior, Nicotiana glutinosa, Nicotiana goodspeedii, Nicotiana gossei, Nicotiana hesperis, Nicotiana knightiana, Nicotiana maritima, Nicotiana megalosiphon, Nicotiana nudicaulis, Nicotiana paniculata, Nicotiana plumbaginifolia, Nicotiana repanda, Nicotiana rustica, Nicotiana suaveolens or Nicotiana trigonophylla. Other first tobacco plants include varieties of Nicotiana tabacum (or Nicotiana rustica) or transgenic lines associated therewith that have been engineered to have decreased levels of nicotine demethylase. Other exemplary first tobacco plants include an Oriental, a dark tobacco, flue or air-cured tobacco, Virginia, or a Burley tobacco plant.

[0015] In another embodiment of the above-described breeding method, the second tobacco plant is Nicotiana tabacum. Exemplary varieties of Nicotiana tabacum include commercial varieties such as BU 64, CC 101, CC 200, CC 27, CC 301, CC 400, CC 500, CC 600, CC 700, CC 800, CC 900, Coker 176, Coker 319, Coker 371 Gold, Coker 48, CU 263, DF911, Galpao tobacco, GL 26H, GL 350, GL 737, GL 939, GL 973, HB 04P, K 149, K 326, K 346, K 358, K 394, K 399, K 730, KT 200, KY 10, KY 14, KY 160, KY 17, KY 171, KY 907, KY 160, Little Crittenden, McNair 373, McNair 944, msKY 14×L8, Narrow Leaf Madole, NC 100, NC 102, NC 2000, NC 291, NC 297, NC 299, NC 3, NC 4, NC 5, NC 6, NC 606, NC 71, NC 72, NC 810, NC BH 129, OXFORD 207, ‘Perique’ tobacco, PVH03, PVH09, PVH19, PVH50, PVH51, R 610, R 630, R 7-11, R 7-12, RG 17, RG 81, RG H4, RG H51, RGH 4, RGH 51, RS 1410, SP 168, SP 172, SP 179, SP 210, SP 220, SP G-28, SP G-70, SP H20, SP NF3, TN 86, TN 90, TN 97, TN D94, TN D950, TR (Tom Rosson) Madole, VA 309, VA 309, or VA 359.

[0016] In still other embodiments, the phenotypic trait of the second tobacco plant includes disease resistance; high yield; high grade index; curability; curing quality; mechanical harvestability; holding ability; leaf quality; height, plant maturation (e.g., early maturing, early to medium maturing, medium maturing, medium to late maturing, or late maturing); stalk size (e.g., a small, medium, or a large stalk); or leaf number per plant (e.g., a small (e.g., 5-10 leaves), medium (e.g., 11-15 leaves), or large (e.g., 16-21) number of leaves). In still other embodiments, the method further includes self-pollinating or pollinating a male sterile pollen acceptor, a pollen donor capable of being used in production of a hybrid or a male sterile hybrid with the plant of step (b) or backcrossing or self-pollinating plants produced from germinated seed of step (e).

[0017] In another aspect, the invention features a method of breeding a nicotine demethylase deficiency trait into a tobacco plant, the method including the steps of: a) crossing a first tobacco plant having variant nicotine demethylase gene expression with a second tobacco plant; b) producing progeny tobacco plants of the cross; c) extracting a DNA sample from progeny tobacco plants; d) contacting the DNA sample with a marker nucleic acid molecule that hybridizes to a nicotine demethylase gene or fragment thereof; and e) performing a marker assisted breeding method for the variant nicotine demethylase gene expression trait. For example, plants are identified as having variant gene expression of a nicotine demethylase and, if desired, are further tested for nicotine demethylase gene expression or tested using standard alkaloid profiling or immunoblotting analysis. Typically such a marker assisted breeding method includes utilizing an amplified fragment length polymorphism, restriction fragment length polymorphism, random amplified polymorphism display, single nucleotide polymorphism, a microsatellite marker, or a targeted induced local lesion in a tobacco genome.

[0018] In yet another aspect, the invention features a method of producing tobacco seed, including crossing any one of the tobacco plants selected from the group consisting of Nicotiana africana, Nicotiana amplexicaulis, Nicotiana arentsii, Nicotiana benthamiana, Nicotiana bigelovii, Nicotiana corymbosa, Nicotiana debneyi, Nicotiana excelsior, Nicotiana exigua, Nicotiana glutinosa, Nicotiana goodspeedii, Nicotiana gossei, Nicotiana hesperis, Nicotiana ingulba, Nicotiana knightiana, Nicotiana maritima, Nicotiana megalosiphon, Nicotiana miersii, Nicotiana nesophila, Nicotiana noctiflora, Nicotiana nudicaulis, Nicotiana otophora, Nicotiana palmeri, Nicotiana paniculata, Nicotiana petunioides, Nicotiana plumbaginifolia, Nicotiana repanda, Nicotiana rosulata, Nicotiana rotundifolia, Nicotiana rustica, Nicotiana setchelli, Nicotiana stocktonii, Nicotiana eastii, Nicotiana suaveolens, and Nicotiana trigonophylla with itself. In one embodiment, the method further includes a method of preparing hybrid tobacco seed, including crossing a tobacco plant having variant nicotine demethylase gene expression to a second, distinct tobacco plant. In still another embodiment of this method, the crossing includes the steps of: (a) planting a seed of the cross resulting from the tobacco plant having variant nicotine demethylase gene expression and a second, distinct tobacco plant; (b) growing tobacco plants from the seed until the plants bear flowers; (c) pollinating a flower of the tobacco plant having variant nicotine demethylase gene expression with pollen from the second tobacco plant or pollinating a flower of the second tobacco plant with pollen from the flower of the tobacco plant having variant nicotine demethylase gene expression; and (d) harvesting seed resulting from the pollinating.

[0019] In still another aspect, the invention features a method for developing a tobacco plant in a tobacco breeding program including: (a) providing a tobacco plant, or its components, having variant nicotine demethylase gene expression; and (b) employing the plant or plant components as a source of breeding material using tobacco plant breeding techniques. Exemplary plant breeding techniques useful for practicing this method include bulk selection, backcrossing, self-pollination, introgression, pedigree selection, pureline selection, haploid/doubled haploid breeding, or single seed descent.

[0020] In another aspect, the invention features a breeding method for producing a tobacco plant having a modified attribute, the method including the steps of: (a) providing a first tobacco plant having a modified attribute including variant gene expression of a nucleic acid molecule selected from the group consisting of the nucleic acid sequences shown in FIG. 1, FIGS. 3 to 7, FIGS. 10 to 158, FIGS. 162 to 170, FIGS. 172-1 to 172-19, and FIGS. 173-1 to 173-294; (b) providing a second tobacco plant that contains at least one phenotypic trait; (c) crossing the first tobacco plant with the second tobacco plant to produce an F1 progeny plant; (d) collecting seed of the F1 progeny for the modified attribute; and (e) germinating the seed to produce a tobacco plant having the modified attribute. In one embodiment, the first tobacco plant includes an endogenous nucleic acid molecule selected from the group consisting of the nucleic acid sequences shown in FIG. 1, FIGS. 3 to 7, FIGS. 10 to 158, FIGS. 162 to 170, FIGS. 172-1 to 172-19, and FIGS. 173-1 to 173-294, wherein the nucleic acid includes a mutation. Exemplary mutations include deletion, substitution, point mutation, translocation, inversion, duplication, or an insertion.

[0021] In still another embodiment, the first tobacco plant of the above-described method includes an endogenous nucleic acid molecule selected from the group consisting of the nucleic acid sequences shown in FIG. 1, FIGS. 3 to 7, FIGS. 10 to 158, FIGS. 162 to 170, FIGS. 172-1 to 172-19, and FIGS. 173-1 to 173-294, wherein the nucleic acid includes a null mutation. In still yet another embodiment, the first tobacco plant includes a recombinant gene that silences expression of endogenous nucleic acid molecule an endogenous nucleic acid molecule selected from the group consisting of the nucleic acid sequences shown in FIG. 1, FIGS. 3 to 7, FIGS. 10 to 158, FIGS. 162 to 170, FIGS. 172-1 to 172-19, and FIGS. 173-1 to 173-294.

[0022] The first tobacco plant includes, if desired, an endogenous nucleic acid molecule selected from the group consisting of the nucleic acid sequences shown in FIG. 1, FIGS. 3 to 7, FIGS. 10 to 158, FIGS. 162 to 170, FIGS. 172-1 to 172-19, and FIGS. 173-1 to 173-294, wherein the nucleic acid molecule encodes a polypeptide having reduced or altered enzymatic activity. In still other embodiments, the first tobacco plant is a transgenic plant.

[0023] Exemplary first tobacco plants useful in the breeding methods disclosed herein include Nicotiana africana, Nicotiana amplexicaulis, Nicotiana arentsii, Nicotiana benthamiana, Nicotiana bigelovii, Nicotiana corymbosa, Nicotiana debneyi, Nicotiana excelsior, Nicotiana exigua, Nicotiana glutinosa, Nicotiana goodspeedii, Nicotiana gossei, Nicotiana hesperis, Nicotiana ingulba, Nicotiana knightiana, Nicotiana maritima, Nicotiana megalosiphon, Nicotiana miersii, Nicotiana nesophila, Nicotiana noctiflora, Nicotiana nudicaulis, Nicotiana otophora, Nicotiana palmeri, Nicotiana paniculata, Nicotiana petunioides, Nicotiana plumbaginifolia, Nicotiana repanda, Nicotiana rosulata, Nicotiana rotundifolia, Nicotiana rustica, Nicotiana setchelli, Nicotiana stocktonii, Nicotiana eastii, Nicotiana suaveolens or Nicotiana trigonophylla. Other first tobacco plants include varieties of Nicotiana tabacum or Nicotiana rustica. Still other first tobacco plant is an Oriental, a dark tobacco, flue or air-cured tobacco, Virginia, or a Burley tobacco plant.

[0024] In another embodiment of the above-described breeding method, the second tobacco plant is Nicotiana tabacum. Exemplary varieties of Nicotiana tabacum include commercial varieties such as BU 64, CC 101, CC 200, CC 27, CC 301, CC 400, CC 500, CC 600, CC 700, CC 800, CC 900, Coker 176, Coker 319, Coker 371 Gold, Coker 48, CU 263, DF911, Galpao tobacco, GL 26H, GL 350, GL 737, GL 939, GL 973, HB 04P, K 149, K 326, K 346, K 358, K 394, K 399, K 730, KT 200, KY 10, KY 14, KY 160, KY 17, KY 171, KY 907, KY 160, Little Crittenden, McNair 373, McNair 944, msKY 14×L8, Narrow Leaf Madole, NC 100, NC 102, NC 2000, NC 291, NC 297, NC 299, NC 3, NC 4, NC 5, NC 6, NC 606, NC 71, NC 72, NC 810, NC BH 129, OXFORD 207, ‘Perique’ tobacco, PVH03, PVH09, PVH19, PVH50, PVH51, R 610, R 630, R 7-11, R 7-12, RG 17, RG 81, RG H4, RG H51, RGH 4, RGH 51, RS 1410, SP 168, SP 172, SP 179, SP 210, SP 220, SP G-28, SP G-70, SP H20, SP NF3, TN 86, TN 90, TN 97, TN D94, TN D950, TR (Tom Rosson) Madole, VA 309, VA 309, or VA 359.

[0025] In still other embodiments, the phenotypic trait of the second tobacco plant includes disease resistance; high yield; high grade index; curability; curing quality; mechanical harvestability; holding ability; leaf quality; height, plant maturation (e.g., early maturing, early to medium maturing, medium maturing, medium to late maturing, or late maturing); stalk size (e.g., a small, medium, or a large stalk); or leaf number per plant (e.g., a small (e.g., 5-10 leaves), medium (e.g., 11-15 leaves), or large (e.g., 16-21) number of leaves).

[0026] In still further embodiments, the method includes pollinating a male sterile or a male sterile hybrid with the plant of step (b) or backcrossing or pollinating plants produced from germinated seed of step (e). In another aspect, the invention features a method of breeding an attribute into a tobacco plant, the method including the steps of: a) crossing a first tobacco plant having a modified attribute including variant gene expression of a nucleic acid molecule selected from the group consisting of the nucleic acid sequences shown in FIG. 1, FIGS. 3 to 7, FIGS. 10 to 158, FIGS. 162 to 170, FIGS. 172-1 to 172-19, and FIGS. 173-1 to 173-294 with a second tobacco plant; b) producing progeny tobacco plants of the cross; c) extracting a DNA sample from progeny tobacco plants; d) contacting the DNA sample with a marker nucleic acid molecule that hybridizes to a nucleic acid molecule selected from the group consisting of the nucleic acid sequences shown in FIG. 1, FIGS. 3 to 7, FIGS. 10 to 158, FIGS. 162 to 170, FIGS. 172-1 to 172-19, and FIGS. 173-1 to 173-294 or a fragment thereof; and e) performing a marker assisted breeding method for the modified attribute. Typically such a marker assisted breeding method includes utilizing an amplified fragment length polymorphism, restriction fragment length polymorphism, random amplified polymorphism display, single nucleotide polymorphism, a microsatellite marker, or a targeted induced local lesion in a tobacco genome.

[0027] In yet another aspect, the invention features a method of producing tobacco seed, including crossing any one of the tobacco plants selected from the group consisting of Nicotiana africana, Nicotiana amplexicaulis, Nicotiana arentsii, Nicotiana benthamiana, Nicotiana bigelovii, Nicotiana corymbosa, Nicotiana debneyi, Nicotiana excelsior, Nicotiana exigua, Nicotiana glutinosa, Nicotiana goodspeedii, Nicotiana gossei, Nicotiana hesperis, Nicotiana ingulba, Nicotiana knightiana, Nicotiana maritima, Nicotiana megalosiphon, Nicotiana miersii, Nicotiana nesophila, Nicotiana noctiflora, Nicotiana nudicaulis, Nicotiana otophora, Nicotiana palmeri, Nicotiana paniculata, Nicotiana petunioides, Nicotiana plumbaginifolia, Nicotiana repanda, Nicotiana rosulata, Nicotiana rotundifolia, Nicotiana rustica, Nicotiana setchelli, Nicotiana stocktonii, Nicotiana eastii, Nicotiana suaveolens and Nicotiana trigonophylla with a tobacco plant having a modified attribute including variant gene expression of a nucleic acid molecule selected from the group consisting of the nucleic acid sequences shown in FIG. 1, FIGS. 3 to 7, FIGS. 10 to 158, FIGS. 162 to 170, FIGS. 172-1 to 172-19, and FIGS. 173-1 to 173-294 to a second, distinct tobacco plant.

[0028] In still another embodiment, crossing includes the steps of: (a) planting a seed of the cross resulting from the tobacco plant having the modified attribute and a second, distinct tobacco plant; (b) growing tobacco plants from the seed until the plants bear flowers; (c) pollinating a flower of the tobacco plant having a modified attribute with pollen from the second tobacco plant or pollinating a flower of the second tobacco plant with pollen from the plant of the tobacco plant having the modified attribute; and (d) harvesting seed resulting from the pollinating.

[0029] In still another aspect, the invention features a method for developing a tobacco plant in a tobacco breeding program including: (a) providing a tobacco plant, or its components, having a modified attribute including variant gene expression of a nucleic acid molecule selected from the group consisting of the nucleic acid sequences shown in FIG. 1, FIGS. 3 to 7, FIGS. 10 to 158, FIGS. 162 to 170, FIGS. 172-1 to 172-19, and FIGS. 173-1 to 173-294; and (b) employing the plant or plant components as a source of breeding material using tobacco plant breeding techniques. Exemplary plant breeding techniques include bulk selection, backcrossing, self-pollination, introgression, pedigree selection, pureline selection, haploid/doubled haploid breeding, or single seed descent.

[0030] In related aspects the invention features a tobacco plant or components thereof, produced according to any one of the aforementioned breeding methods. In still a further related aspect, the invention features a tissue culture of regenerable tobacco cells obtained from any one of the plants bred or produced according to the methods described herein. Such tissue cultures regenerate tobacco plants capable of expressing all the physiological and morphological characteristics of the tobacco plant having variant nicotine demethylase gene expression or a modified attribute. Exemplary regenerable cells are embryos, meristematic cells, seeds, pollen, leaves, roots, root tips, or flowers or are protoplasts or callus derived therefrom.

[0031] In still related aspects, the invention features a method of producing a tobacco product involving: (a) providing a tobacco plant produced according to any one of the aforementioned breeding methods; and (b) preparing a tobacco product from the tobacco plant. Exemplary tobacco products include leaves or stems or both; a smokeless tobacco product; a moist or dry snuff; a chewing tobaccos; cigarette products; cigar products; cigarillos; pipe tobaccos; or bidis.

[0032] An aspect of the invention features an isolated genetic marker including a nucleic acid sequence that is substantially identical, desirably at least 70% identical, to a nucleic acid sequence shown in FIG. 1, FIGS. 3 to 7, FIGS. 10 to 158, FIGS. 162 to 170, FIGS. 172-1 to 172-19, and FIGS. 173-1 to 173-294. In a desirable embodiment of this aspect of the invention, the nucleic acid sequence includes a sequence that hybridizes under stringent conditions to the complement of a nucleic acid sequence shown in FIG. 1, FIGS. 3 to 7, FIGS. 10 to 158, FIGS. 162 to 170, FIGS. 172-1 to 172-19, and FIGS. 173-1 to 173-294. In other desirable embodiments, the nucleic acid sequence is constitutive, or ethylene or senescence induced. In addition, the nucleic acid sequence desirably encodes a polypeptide that is substantially identical to an amino acid sequence shown in FIG. 1, FIGS. 3 and 4, FIGS. 10 to 158, FIGS. 160A to 160E, FIGS. 162 to 170, and FIGS. 172-1 to 172-19.

[0033] In other desirable embodiments of the invention, the nucleic acid sequence is operably linked to a heterologous gene or the nucleic acid sequence is operably linked to an inducible, constitutive, pathogen- or wound-induced, environmentally- or developmentally-regulated, or cell- or tissue-specific promoter.

[0034] In another aspect, the invention features an expression vector containing a nucleic acid sequence shown in FIG. 1, FIGS. 3 to 7, FIGS. 10 to 158, FIGS. 162 to 170, FIGS. 172-1 to 172-19, and FIGS. 173-1 to 173-294, where the vector is capable of directing expression of the polypeptide encoded by the nucleic acid sequence.

[0035] Further aspects of the invention features a substantially pure polypeptide containing the amino acid sequence of a polypeptide shown in FIG. 1, FIGS. 3 and 4, FIGS. 10 to 158, FIGS. 160A to 160E, FIGS. 162 to 170, or FIGS. 172-1 to 172-19, as well as antibodies that specifically recognize the polypeptide.

[0036] An additional aspect of the invention features a plant or plant component containing an isolated nucleic acid sequence shown in FIG. 1, FIGS. 3 to 7, FIGS. 10 to 158, FIGS. 162 to 170, FIGS. 172-1 to 172-19, and FIGS. 173-1 to 173-294, where the nucleic acid sequence is expressed in the plant or the plant component, or a nucleic acid sequence that encodes a polypeptide that is substantially identical to an amino acid sequence shown in FIG. 1, FIGS. 3 and 4, FIGS. 10 to 158, FIGS. 160A to 160E, FIGS. 162 to 170, and FIGS. 172-1 to 172-19, where the nucleic acid sequence is expressed in the plant or the plant component. Desirably, the plant or plant component is a species of Nicotiana, for example, a Nicotiana species shown in Table 8. In other desirable embodiments, the plant component is a leaf, e.g., a cured tobacco leaf, a stem, or a seed. A desirable embodiment features a plant from the germinated seed.

[0037] In a further aspect, the invention features a tobacco product containing a plant or plant component containing an isolated nucleic acid sequence shown in FIG. 1, FIGS. 3 to 7, FIGS. 10 to 158, FIGS. 162 to 170, FIGS. 172-1 to 172-19, and FIGS. 173-1 to 173-294, where the nucleic acid sequence is expressed in the plant or the plant component. Desirably, the expression of an endogenous gene in the cured tobacco plant or plant component is silenced. In other desirable embodiments, the tobacco product is a smokeless tobacco product, moist or dry snuff, a chewing tobaccos, cigarette products, cigar products, cigarillos, pipe tobaccos, or bidis.

[0038] In particular, the tobacco product of this aspect of the invention may contain dark tobacco, milled tobacco, or include a flavoring component.

[0039] An additional aspect of the invention features a method for reducing the expression or enzymatic activity of a constitutive, or an ethylene induced or senescence induced tobacco polypeptide in a plant cell. This method involves reducing the level or enzymatic activity of an endogenous constitutive, or ethylene or senescence induced tobacco polypeptide in the plant cell. In a desirable embodiment, the tobacco polypeptide is a p450. In other desirable embodiments, the plant cell is from a species of Nicotiana, e.g., one of the Nicotiana species shown in Table 8.

[0040] In further desirable embodiments, reducing the level of the endogenous constitutive, or ethylene or senescence induced tobacco polypeptide involves expressing a transgene encoding an antisense nucleic acid molecule of a nucleic acid sequence shown in FIG. 1, FIGS. 3 to 7, FIGS. 10 to 158, FIGS. 162 to 170, FIGS. 172-1 to 172-19, and FIGS. 173-1 to 173-294 a nucleic acid sequence that encodes a polypeptide containing an amino acid sequence shown in FIG. 1, FIGS. 3 and 4, FIGS. 10 to 158, FIGS. 160A to 160E, FIGS. 162 to 170, and FIGS. 172-1 to 172-19 in the plant cell. In another desirable embodiment, the transgene encodes a double-stranded RNA molecule of a constitutive, or an ethylene or senescence induced tobacco nucleic acid or amino acid sequence in the plant cell. In other desirable embodiments, the transgene is expressed, for example, in a tissue-specific, cell-specific, or organ-specific manner. In addition, reducing the level of the endogenous constitutive, or ethylene or senescence induced tobacco polypeptide desirably involves co-suppression of the constitutive, or ethylene or senescence induced tobacco polypeptide in the plant cell. In another desirable embodiment, reducing the level of the endogenous constitutive, or ethylene or senescence induced tobacco polypeptide involves expressing a dominant negative gene product in the plant cell. Desirably, the endogenous constitutive, or ethylene or senescence induced tobacco polypeptide includes a mutation in a gene that encodes an amino acid sequence shown in FIG. 1, FIGS. 3 and 4, FIGS. 10 to 158, FIGS. 160A to 160E, FIGS. 162 to 170, and FIGS. 172-1 to 172-19. In further desirable embodiments, reduced expression occurs at the transcriptional level, at the translational level, or at the post-translational level.

[0041] An additional aspect the invention features a method for increasing the expression or enzymatic activity of a constitutive, or an ethylene or senescence induced tobacco polypeptide in a plant cell. This method involves increasing the level or enzymatic activity of an endogenous constitutive, or ethylene or senescence induced tobacco polypeptide in the plant cell. In a desirable embodiment of this aspect of the invention, the plant cell is from a species of Nicotiana, for example, a Nicotiana species shown in Table 8. In another desirable embodiment, increasing the level of the constitutive, or ethylene or senescence induced tobacco polypeptide involves expressing a transgene including a nucleic acid sequence shown in FIG. 1, FIGS. 3 to 7, FIGS. 10 to 158, FIGS. 162 to 170, FIGS. 172-1 to 172-19, and FIGS. 173-1 to 173-294 or a nucleic acid sequence that encodes a polypeptide containing an amino acid sequence shown in FIG. 1, FIGS. 3 and 4, FIGS. 10 to 158, FIGS. 160A to 160E, FIGS. 162 to 170, and FIGS. 172-1 to 172-19 in the plant cell. Desirably, increased expression occurs at the transcriptional level, at the translational level, or at the post-translational level.

[0042] A further aspect of the invention features a method of producing a constitutive, or an ethylene or senescence induced tobacco polypeptide. This method involves the steps of: (a) providing a cell transformed with an isolated nucleic acid molecule containing a nucleic acid sequence shown in FIG. 1, FIGS. 3 to 7, FIGS. 10 to 158, FIGS. 162 to 170, FIGS. 172-1 to 172-19, and FIGS. 173-1 to 173-294; (b) culturing the transformed cell under conditions for expressing the isolated nucleic acid molecule; and (c) recovering the constitutive, or ethylene or senescence induced tobacco polypeptide. Desirably, the constitutive, or ethylene or senescence induced tobacco polypeptide is a p450. In another desirable embodiment, the invention features a recombinant constitutive, or ethylene or senescence induced tobacco polypeptide produced according to the method of this aspect of the invention.

[0043] In another aspect, the invention features a method of isolating a constitutive, or an ethylene or senescence induced tobacco polypeptide or fragment thereof. This method involves the steps of: (a) contacting a nucleic acid sequence shown in FIG. 1, FIGS. 3 to 7, FIGS. 10 to 158, FIGS. 162 to 170, FIGS. 172-1 to 172-19, and FIGS. 173-1 to 173-294 or a portion thereof with a nucleic acid preparation from a plant cell under hybridization conditions providing detection of nucleic acid sequences having at least 70% or greater sequence identity to a nucleic acid sequence shown in FIG. 1, FIGS. 3 to 7, FIGS. 10 to 158, FIGS. 162 to 170, FIGS. 172-1 to 172-19, and FIGS. 173-1 to 173-294; and (b) isolating the hybridizing nucleic acid sequences. Desirably, the constitutive, or ethylene or senescence induced tobacco polypeptide is a p450.

[0044] A further aspect of the invention features an isolated nucleic acid molecule, for example, a DNA sequence, containing a nucleotide sequence encoding a nicotine demethylase. In desirable embodiments, the nucleotide sequence of the first aspect is substantially identical to a nucleotide sequence encoding a tobacco nicotine demethylase, such as a tobacco nicotine demethylase containing a nucleotide sequence that is at least 70% identical to the nucleotide sequence of SEQ ID NO:4 or SEQ ID NO:5, or that contains nucleotides 2010-2949 and/or 3947-4562 of SEQ ID NO:4, or that contains the sequence of SEQ ID NO:4 or SEQ ID NO:5. The isolated nucleic acid molecule of the first aspect of the invention, for example, is operably linked to a promoter functional in a plant cell and desirably is contained in an expression vector. In other desirable embodiments, the expression vector is contained in a cell, e.g., a plant cell. Desirably, the plant cell, such as a tobacco plant cell, is included in a plant. In another desirable embodiment, the invention features a seed, e.g., a tobacco seed, from a plant containing the expression vector, where the seed includes an isolated nucleic acid molecule that hybridizes under stringent conditions to the sequence of SEQ ID NO:4 operably linked to a heterologous promoter sequence. Furthermore, the invention features a plant derived from a germinated seed containing the expression vector, a leaf, either green or cured, from the plant, and an article of manufacture made from the leaf.

[0045] In another desirable embodiment, the nucleotide sequence contains a sequence that hybridizes under stringent conditions to the complement of the nucleotide sequence of SEQ ID NO:4 and/or SEQ ID NO:5, or to a fragment of SEQ ID NO:4 or SEQ ID NO:5. Desirably, the nucleotide sequence encodes a nicotine demethylase that is substantially identical to the amino acid sequence of SEQ ID NO:3. In a further desirable embodiment of the first aspect of the invention, the nicotine demethylase has at least 70% amino acid sequence identity to the nicotine demethylase amino acid sequence of SEQ ID NO:3 or to a fragment of a nicotine demethylase having altered (e.g., reduced) enzymatic activity as compared to the full-length polypeptide. Desirably, the nicotine demethylase includes the amino acid sequence of SEQ ID NO:3.

[0046] In another aspect, the invention features an isolated nucleic acid molecule containing a promoter that hybridizes under stringent conditions to the sequence of SEQ ID NO:8, or a fragment thereof that drives transcription. Desirably, the promoter (i) is induced following treatment with ethylene or during senescence; and (ii) includes (a) base pairs 1-2009 of SEQ ID NO:4, or (b) at least 200 consecutive base pairs identical to 200 consecutive base pairs of the sequence defined by base pairs 1-2009 of SEQ ID NO:4, or (c) a 20 base pair nucleotide portion identical in sequence to a 20 consecutive base pair portion of the sequence set forth in base pairs 1-2009 of SEQ ID NO:4.

[0047] A further aspect of the invention features an isolated nucleic acid promoter containing a nucleotide sequence having 50% or more sequence identity with the sequence of SEQ ID NO:8. Desirably, this isolated nucleic acid promoter is induced following treatment with ethylene or during senescence and, for example, includes the sequence of SEQ ID NO:8. Alternatively, the promoter may include a fragment obtainable from SEQ ID NO:8, where the fragment drives transcription of a heterologous gene or reduces or alters nicotine demethylase enzymatic activity (for example, silences gene expression). In a desirable embodiment the promoter sequence is operably linked to a heterologous nucleic acid sequence, and may, for example be contained in an expression vector. In other desirable embodiments the expression vector is contained in a cell, e.g., a plant cell. Desirably, the plant cell, such as a tobacco plant cell, is included in a plant. In another desirable embodiment, the invention features a seed, e.g., a tobacco seed, from a plant containing the expression vector, where the seed includes an isolated nucleic acid molecule that hybridizes under stringent conditions to the sequence of SEQ ID NO:8 operably linked to a heterologous nucleic acid sequence. Furthermore, the invention features a plant derived from a germinated seed containing the promoter of this aspect of the invention, a leaf, either green or cured, from the plant, and an article of manufacture made from the leaf.

[0048] Another aspect of the invention features a method of expressing a heterologous gene in a plant. This method involves (i) introducing into a plant cell a vector containing a promoter sequence having 50% or more sequence identity with the sequence of SEQ ID NO:8 operably linked to a heterologous nucleic acid sequence; and (ii) regenerating a plant from the cell. In addition, this method may involve sexually transmitting the vector to progeny and, further, may include the step of collecting the seed produced by the progeny.

[0049] In yet another aspect, the invention features a method of reducing expression of nicotine demethylase in a tobacco plant. This method includes the steps of (i) introducing into the tobacco plant a vector containing the sequence of SEQ ID NO:8 or a fragment obtainable from SEQ ID NO:8 operably linked to a heterologous nucleic acid sequence and (ii) expressing the vector in the tobacco plant. In a desirable embodiment of this method, expression of the nicotine demethylase is silenced. In other desirable embodiment, the vector expresses RNA, such as antisense RNA or an RNA molecule capable of inducing RNA interference (RNAi).

[0050] In a further desirable aspect, the invention features an isolated nucleic acid molecule containing an intron that hybridizes under stringent conditions to the sequence of SEQ ID NO:7, or a fragment thereof that reduces or alters nicotine demethylase enzymatic activity (for example, silences gene expression) or can serve as a molecular marker to identify nicotine demethylase nucleic acid sequences. In a desirable embodiment, the intron includes (a) base pairs 2950-3946 of SEQ ID NO:4, or (b) at least 200 consecutive base pairs identical to 200 consecutive base pairs of the sequence defined by base pairs 2950-3946 of SEQ ID NO:4, or (c) a 20 base pair nucleotide portion identical in sequence to a 20 consecutive base pair portion of the sequence set forth in base pairs 2950-3946 of SEQ ID NO:4.

[0051] Another desirable aspect of the invention features an isolated nucleic acid intron including a nucleotide sequence having 50% or more sequence identity with the sequence of SEQ ID NO:7, or a fragment thereof that reduces or alters nicotine demethylase enzymatic activity (for example, silences gene expression) or can serve as a molecular marker to identify nicotine demethylase nucleic acid sequences. Silencing gene expression may, for example, involve homologous recombination (e.g., using the sequence of SEQ ID NO:188, or a fragment thereof) or a mutation that results in a gene product that does not have nicotine demethylase activity. In particular, the intron may include the sequence of SEQ ID NO:7 or a fragment obtainable from SEQ ID NO:7. Desirably, an isolated nucleic acid molecule including an intron is operably linked to a heterologous nucleic acid sequence and this sequence desirably is included in an expression vector. In another embodiment, the expression vector is contained in a cell, such as a plant cell. In particular, the cell may be a tobacco cell. A plant, e.g., a tobacco plant, including a plant cell plant containing the sequence of SEQ ID NO:7 or a fragment obtainable from SEQ ID NO:7 operably linked to a heterologous nucleic acid sequence in an expression vector is another desirable embodiment of the present invention. Further, a seed, for example, a tobacco seed, from a plant, where the seed contains an intron that hybridizes under stringent conditions to SEQ ID NO:7 operably linked to a heterologous nucleic acid sequence is also desirable. Furthermore, the invention features a plant derived from the germinated seed containing the intron of this aspect of the invention, a leaf, either green or cured, from the plant, and an article of manufacture made from the green or cured leaf.

[0052] A further aspect of the invention features a method of expressing an intron in a plant. This method involves (i) introducing into a plant cell an expression vector containing the sequence of SEQ ID NO:7 or a fragment obtainable from SEQ ID NO:7 operably linked to a heterologous nucleic acid sequence; and (ii) regenerating a plant from the cell. In a desirable embodiment, this method also involves (iii) sexually transmitting the vector to progeny, and may include the additional step of collecting the seed produced by the progeny. The method desirably includes, for example, regenerating a plant from the germinated seed, a leaf, either green or cured, from the plant, and a method of making an article of manufacture from the leaf.

[0053] In yet another aspect, the invention features a method of reducing expression of nicotine demethylase in a tobacco plant. This method includes the steps of (i) introducing into the tobacco plant a vector containing the sequence of SEQ ID NO:7 or a fragment obtainable from SEQ ID NO:7 operably linked to a heterologous nucleic acid sequence and (ii) expressing the vector in the tobacco plant. In a desirable embodiment of this method, expression of the nicotine demethylase is silenced. In other desirable embodiment, the vector expresses RNA, such as antisense RNA or an RNA molecule capable of inducing RNA interference (RNAi).

[0054] In an additional aspect, the invention features an isolated nucleic acid molecule containing an untranslated region that hybridizes under stringent conditions to the sequence of SEQ ID NO:9 or a fragment thereof that can alter the expression pattern of a gene, reduces or alters nicotine demethylase enzymatic activity (for example, silences gene expression), or can be used as a marker to identify nicotine demethylase nucleic acid sequences. In a desirable embodiment of this aspect of the invention, the untranslated region includes (a) base pairs 4563-6347 of SEQ ID NO:4, or (b) at least 200 consecutive base pairs identical to 200 consecutive base pairs of the sequence defined by base pairs 4563-6347 of SEQ ID NO:4, or (c) a 20 base pair nucleotide portion identical in sequence to a 20 consecutive base pair portion of the sequence set forth in base pairs 4563-6347 of SEQ ID NO:4.

[0055] An additional desirable aspect of the invention features an isolated nucleic acid untranslated region containing a nucleotide sequence having 50% or more sequence identity with the sequence of SEQ ID NO:9. Desirably, the untranslated region includes the sequence of SEQ ID NO:9 or the untranslated region includes a fragment obtainable from SEQ ID NO:9 that can alter the expression pattern of a gene, reduces or alters nicotine demethylase enzymatic activity (for example, silences gene expression), or can be used as a marker to identify nicotine demethylase nucleic acid sequences. The untranslated region desirably is operably linked to a heterologous nucleic acid sequence and may be contained in an expression vector. Further, this expression vector is desirably contained in a cell, such as a plant cell, e.g., a tobacco cell. Another desirable embodiment of the invention features a plant, such as a tobacco plant, including a plant cell containing a vector that includes an isolated nucleic acid sequence that has 50% or more sequence identity with the sequence of SEQ ID NO:9 and is operably linked to a heterologous nucleic acid sequence.

[0056] The invention also features a seed, for example, a tobacco seed, from a plant, where the seed includes an untranslated region that hybridizes under stringent conditions to SEQ ID NO:9 operably linked to a heterologous nucleic acid sequence. Furthermore, the invention features a plant derived from a germinated seed containing the untranslated region of this aspect of the invention, a leaf, either green or cured, from the plant, and an article of manufacture made from the green or cured leaf.

[0057] In a further aspect, the invention features a method of expressing an untranslated region in a plant. This method involves (i) introducing into a plant cell a vector containing an isolated nucleic acid sequence that has 50% or more sequence identity with the sequence of SEQ ID NO:9 and is operably linked to a heterologous nucleic acid sequence; and (ii) regenerating a plant from the cell. In addition, this method may also involve (iii) sexually transmitting the vector to progeny, and desirably, includes the additional step of collecting the seed produced by the progeny. The method desirably includes regenerating a plant from the germinated seed, a leaf, either green or cured, from the plant, and a method of making an article of manufacture made from the green or cured leaf.

[0058] Furthermore, the invention features a method of reducing expression or altering the enzymatic activity of nicotine demethylase in a tobacco plant. This method includes the steps of (i) introducing into the tobacco plant a vector containing an isolated nucleic acid sequence that has 50% or more sequence identity with the sequence of SEQ ID NO:9 and is operably linked to a heterologous nucleic acid sequence and (ii) expressing the vector in the tobacco plant. Desirably, expression of the nicotine demethylase is silenced. In other desirable embodiments the vector expresses RNA, e.g., antisense RNA or an RNA molecule capable of inducing RNA interference (RNAi).

[0059] Another aspect of the invention features an expression vector including a nucleic acid molecule containing a nucleotide sequence encoding a nicotine demethylase, where the vector is capable of directing expression of the nicotine demethylase encoded by the isolated nucleic acid molecule. Desirably, the vector includes the sequence of SEQ ID NO:4 or SEQ ID NO:5. In other desirable embodiments, the invention features a plant or plant component, e.g., a tobacco plant or plant component (e.g., a tobacco leaf or stem), that includes a nucleic acid molecule containing a nucleotide sequence encoding a polypeptide that demethylates nicotine.

[0060] A further aspect of the invention features a cell containing an isolated nucleic acid molecule that includes a nucleotide sequence encoding a nicotine demethylase. Desirably this cell is a plant cell or a bacterial cell, such as an Agrobacterium.

[0061] Another aspect of the invention features a plant or plant component (e.g., a tobacco leaf or stem) containing an isolated nucleic acid molecule that encodes a nicotine demethylase, where the nucleic acid molecule is expressed in the plant or the plant component. Desirably, the plant or plant component is an angiosperm, a dicot, a solanaceous plant, or a species of Nicotiana. Other desirable embodiments of this aspect are a seed or a cell from the plant or plant component, as well as a leaf, either green or cured, derived from the plant and an article of manufacture made therefrom.

[0062] In an additional aspect, the invention features a tobacco plant having reduced expression of a nucleic acid sequence encoding a polypeptide, for example, one that includes the sequence of SEQ ID NO:3, and that demethylates nicotine, where the reduced expression (or a reduction in enzymatic activity) reduces the level of nornicotine in the plant. In a desirable embodiment, the tobacco plant is a transgenic plant, such as one that includes a transgene that, when expressed in the transgenic plant, silences gene expression of an endogenous tobacco nicotine demethylase.

[0063] In particular, the transgenic plant desirably includes one or more of the following: a transgene that expresses an antisense molecule of a tobacco nicotine demethylase or an RNA molecule capable of inducing RNA interference (RNAi); a transgene that, when expressed in the transgenic plant, co-suppresses expression of a tobacco nicotine demethylase; a transgene that encodes a dominant negative gene product, e.g., a mutated form the amino acid sequence of SEQ ID NO:3; a point mutation in a gene that encodes the amino acid sequence of SEQ ID NO:3; a deletion in a gene that encodes a tobacco nicotine demethylase; and an insertion in a gene that encodes a tobacco nicotine demethylase.

[0064] In other desirable embodiments, reduced expression of a nucleic acid sequence encoding a polypeptide occurs at the transcriptional level, at the translational level, or at the post-translational level.

[0065] Another aspect of the invention features a tobacco plant containing a recombinant expression cassette stably integrated into the genome thereof, where the cassette is capable of effecting a reduction in nicotine demethylase activity. Seeds of this tobacco plant are featured in a desirable embodiment. Other desirable embodiments include leaf, either green or cured, derived from this plant and an article of manufacture made therefrom.

[0066] A further aspect of the invention features a method of expressing a tobacco nicotine demethylase in a plant. This method involves (i) introducing into a plant cell an expression vector including a nucleic acid molecule containing a nucleotide sequence encoding a nicotine demethylase; and (ii) regenerating a plant from the cell. In a desirable embodiment, this method features sexually transmitting the vector to progeny, and desirably also includes the additional step of collecting the seed produced by the progeny. Additional desirable embodiments include a plant derived from the germinated seed, a leaf, either green or cured, from the plant, and an article of manufacture made from the green or cured leaf.

[0067] An additional aspect of the invention features a substantially pure tobacco nicotine demethylase. Desirably, this tobacco nicotine demethylase includes an amino acid sequence having at least 70% identity to the amino acid sequence of SEQ ID NO:3 or includes the amino acid sequence of SEQ ID NO:3. In a desirable embodiment, the tobacco nicotine demethylase, upon expression in a plant cell, converts nicotine to nornicotine. In other desirable embodiments, the tobacco nicotine demethylase, upon expression in a plant cell, is predominantly localized in leaves, or the tobacco nicotine demethylase is induced by ethylene or is expressed during plant senescence.

[0068] In a further aspect, the invention features a substantially pure antibody that specifically recognizes and binds to a tobacco nicotine demethylase. Desirably, the antibody recognizes and binds to a recombinant tobacco nicotine demethylase, e.g., one containing the sequence of SEQ ID NO:3 or a fragment thereof.

[0069] Another aspect of the invention features a method of producing a tobacco nicotine demethylase. This method involves the steps of: (a) providing a cell transformed with an isolated nucleic acid molecule containing a nucleotide sequence encoding a polypeptide that demethylates nicotine; (b) culturing the transformed cell under conditions for expressing the isolated nucleic acid molecule; and (c) recovering the tobacco nicotine demethylase. The invention also features a recombinant tobacco nicotine demethylase produced according to this method.

[0070] In an additional aspect, the invention features a method of isolating a tobacco nicotine demethylase or fragment thereof. This method involves the steps of: (a) contacting the nucleic acid molecule of SEQ ID NOS:4, 5, 7, 8, or 9 or a portion thereof with a nucleic acid preparation from a plant cell under hybridization conditions providing detection of nucleic acid sequences having at least 70% or greater sequence identity to the nucleic acid sequence of SEQ ID NOS:4, 5, 7, 8, or 9; and (b) isolating the hybridizing nucleic acid sequences.

[0071] In a further aspect, the invention features another method of isolating a tobacco nicotine demethylase or fragment thereof. This method includes the steps of: (a) providing a sample of plant cell DNA; (b) providing a pair of oligonucleotides having sequence identity to a region of a nucleic acid molecule having the sequence of SEQ ID NOS:4, 5, 7, 8, or 9; (c) contacting the pair of oligonucleotides with the plant cell DNA under conditions suitable for polymerase chain reaction-mediated DNA amplification; and (d) isolating the amplified tobacco nicotine demethylase or fragment thereof. In a desirable embodiment of this aspect, the amplification step is carried out using a sample of cDNA prepared from a plant cell. In another desirable embodiment, the tobacco nicotine demethylase encodes a polypeptide which is at least 70% identical to the amino acid sequence of SEQ ID NO:3.

[0072] A further aspect of the invention features a method for reducing the expression of tobacco nicotine demethylase in a plant or plant component. This method involves the steps of: (a) introducing into plant cells a transgene encoding a tobacco nicotine demethylase operably linked to a promoter functional in the plant cells to yield transformed plant cells; and (b) regenerating a plant or plant component from the transformed plant cells, where the tobacco nicotine demethylase is expressed in the cells of the plant or plant component, thereby reducing the expression of tobacco nicotine demethylase in a plant or plant component. In particular embodiments of this aspect of the invention, the transgene encoding the tobacco nicotine demethylase is constitutively expressed or inducibly expressed, for example, in a tissue-specific, cell-specific, or organ-specific manner. In another embodiment of this aspect of the invention, expression of the transgene co-suppresses the expression of an endogenous tobacco nicotine demethylase or any other polypeptide described herein.

[0073] A further aspect of the invention features another method for reducing the expression of tobacco nicotine demethylase or any of the other polypeptides described herein in a plant or plant component. This method includes the steps of: (a) introducing into plant cells a transgene encoding an antisense coding sequence of a tobacco nicotine demethylase or an RNA molecule capable of inducing RNA interference (RNAi) operably linked to a promoter functional in the plant cells to yield transformed plant cells; and (b) regenerating a plant or plant component from the transformed plant cells, where the antisense or an RNA molecule capable of inducing RNA interference (RNAi) of the coding sequence of the tobacco nicotine demethylase is expressed in the cells of the plant or plant component, thereby reducing the expression of tobacco nicotine demethylase in a plant or plant component. Desirably, the transgene encoding an antisense sequence or an RNA molecule capable of inducing RNA interference (RNAi) of a tobacco nicotine demethylase is constitutively expressed or is inducibly expressed, for instance in a tissue-specific, cell-specific, or organ-specific manner. In other desirable embodiments the antisense or RNA molecule capable of inducing RNAi of the coding sequence of the tobacco nicotine demethylase contains the complement of SEQ ID NO:1, SEQ ID NO:4, SEQ ID NO:5, SEQ ID NO:7, SEQ ID NO:8, SEQ ID NO:9, SEQ ID NO:61, SEQ ID NO:188, or a fragment thereof.

[0074] An additional aspect of the invention features yet another method for reducing the expression of tobacco nicotine demethylase in a plant or plant component. This method involving the steps of: (a) introducing into plant cells a transgene encoding a dominant negative gene product of a tobacco nicotine demethylase operably linked to a promoter functional in the plant cells to yield transformed plant cells; and (b) regenerating a plant or plant component from the transformed plant cells, where the dominant negative gene product of the tobacco nicotine demethylase is expressed in the cells of the plant or plant component, thereby reducing the expression of tobacco nicotine demethylase in a plant or plant component. In particular embodiments of this aspect of the invention, the transgene encoding the dominant negative gene product is constitutively expressed or is inducibly expressed, for example, in a tissue-specific, cell-specific, or organ-specific manner.

[0075] A further aspect of the invention features an additional method for reducing the expression or the enzymatic activity of tobacco nicotine demethylase in plant cell. This method involves reducing the level of an endogenous tobacco nicotine demethylase, or its enzymatic activity, in the plant cell. Desirably, the plant cell is from a dicot, a solanaceous plant, or a species of Nicotiana. In desirable embodiments of this aspect, reducing the level of endogenous tobacco nicotine demethylase involves expressing a transgene encoding an antisense nucleic acid molecule or an RNA molecule capable of inducing RNA interference (RNAi) of a tobacco nicotine demethylase in the plant cell, or involves expressing a transgene encoding a double-stranded RNA molecule of a tobacco nicotine demethylase in the plant cell. Desirably, the double-stranded RNA is an RNA sequence corresponding to the sequence of SEQ ID NO:1, SEQ ID NO:4, SEQ ID NO:5, SEQ ID NO:7, SEQ ID NO:8, SEQ ID NO:9, SEQ ID NO:61, SEQ ID NO:188 or a fragment thereof. In an additional embodiment, reducing the level of endogenous tobacco nicotine demethylase involves co-suppression of the endogenous tobacco nicotine demethylase in the plant cell or involves expressing a dominant negative gene product in the plant cell. In particular, the dominant negative gene product may include a gene that encodes a mutated form the amino acid sequence of SEQ ID NO:3 or any other amino acid sequence described herein.

[0076] In other desirable embodiments of this aspect of the invention, the endogenous tobacco nicotine demethylase includes a point mutation in a gene that encodes the amino acid sequence of SEQ ID NO:3. In other desirable embodiments reducing the level of expression of an endogenous tobacco nicotine demethylase involves a deletion in a gene that encodes a tobacco nicotine demethylase or involves an insertion in a gene that encodes a tobacco nicotine demethylase. The reduced expression may occur at the transcriptional level, at the translational level, or at the post-translational level.

[0077] A further aspect of the invention features a method for identifying a compound which alters the expression of a tobacco nicotine demethylase in a cell. This method involves the steps of: (a) providing a cell containing a gene encoding a tobacco nicotine demethylase; (b) applying a candidate compound to the cell; and (c) measuring expression of the gene encoding the tobacco nicotine demethylase, where an increase or decrease in expression relative to an untreated control sample is an indication that the compound alters expression of the tobacco nicotine demethylase.

[0078] In a desirable embodiment of this method, the gene of part (a) encodes a tobacco nicotine demethylase having at least 70% identity to the amino acid sequence of SEQ ID NO:3. Desirably, the compound decreases or increases expression of the gene that encodes the tobacco nicotine demethylase.

[0079] In another aspect, the invention features another method for identifying a compound which alters the activity of a tobacco nicotine demethylase in a cell. This method involves the steps of: (a) providing a cell expressing a gene encoding a tobacco nicotine demethylase; (b) applying a candidate compound to the cell; and (c) measuring the activity of the tobacco nicotine demethylase, where an increase or decrease in activity relative to an untreated control sample is an indication that the compound alters activity of the tobacco nicotine demethylase. In a desirable embodiment of this aspect of the invention, the gene of step (a) encodes a tobacco nicotine demethylase having at least 70% identity to the amino acid sequence of SEQ ID NO:3. Desirably, the compound decreases or increases the activity of the tobacco nicotine demethylase.

[0080] A further aspect of the invention features a cured tobacco plant or plant component containing (i) a reduced levels of nicotine demethylase or (ii) a nicotine demthylase having an altered enzymatic activity and a reduced amount of a nitrosamine. Desirably, the plant component is a tobacco leaf or tobacco stem. In a desirable embodiment, the nitrosamine is nornicotine, and the content of nornicotine desirably is less than 5 mg/g, 4.5 mg/g, 4.0 mg/g, 3.5 mg/g, 3.0 mg/g, more desirably less than 2.5 mg/g, 2.0 mg/g, 1.5 mg/g, 1.0 mg/g, more desirably less than 750 μg/g, 500 μg/g, 250 μg/g, 100 μg/g, even more desirably less than 75 μg/g, 50 μg/g, 25 μg/g, 10 μg/g, 7.0 μg/g, 5.0 μg/g, 4.0 μg/g, and even more desirably less than 2.0 μg/g, 1.0 μg/g, 0.5 μg/g, 0.4 μg/g, 0.2 μg/g, 0.1 μg/g, 0.05 μg/g, or 0.01 μg/g or wherein the percentage of secondary alkaloids relative to total alkaloid content therein is less than 90%, 70%, 50%, 30%, 10%, desirably less than 5%, 4%, 3%, 2%, 1.5%, 1%, and more desirably less than 0.75%, 0.5%, 0.25%, or 0.1%. In another desirable embodiment, the nitrosamine is N′-nitrosonornicotine (NNN), and the content of N′-NNN desirably is less than 5 mg/g, 4.5 mg/g, 4.0 mg/g, 3.5 mg/g, 3.0 mg/g, more desirably less than 2.5 mg/g, 2.0 mg/g, 1.5 mg/g, 1.0 mg/g, more desirably less than 750 μg/g, 500 μg/g, 250 μg/g, 100 μg/g, even more desirably less than 75 μg/g, 50 μg/g, 25 μg/g, 10 μg/g, 7.0 μg/g, 5.0 μg/g, 4.0 μg/g, and even more desirably less than 2.0 μg/g, 1.0 μg/g, 0.5 μg/g, 0.4 μg/g, 0.2 μg/g, 0.1 μg/g, 0.05 μg/g, or 0.01 μg/g or wherein the percentage of secondary alkaloids relative to total alkaloid content contained therein is less than 90%, 70%, 50%, 30%, 10%, desirably less than 5%, 4%, 3%, 2%, 1.5%, 1%, and more desirably less than 0.75%, 0.5%, 0.25%, or 0.1%. In additional desirable embodiments of this aspect of the invention, the cured tobacco plant or plant component is a dark tobacco, Burley tobacco, flue-cured tobacco, Virginia, air-cured tobacco, or Oriental tobacco.

[0081] Further, the cured tobacco plant or plant component of the invention desirably includes a recombinant nicotine demethylase gene, e.g., one containing the sequence of SEQ ID NO:4 or SEQ ID NO:5, or a fragment thereof. Desirably, the expression of an endogenous nicotine demethylase gene, or of any other nucleic acid sequence described herein, in the cured tobacco plant or plant component is silenced.

[0082] Another aspect of the invention features a tobacco product containing a cured tobacco plant or plant component that includes (i) reduced expression of a nicotine demethylase or any other polypeptide described herein or (ii) a nicotine demethylase or another polypeptide described herein having altered activity, and a reduced amount of a nitrosamine. Desirably, the tobacco product is smokeless tobacco, moist or dry snuff, a chewing tobaccos, cigarette products, cigar products, cigarillos, pipe tobaccos, or bidis. In particular, the tobacco product of this aspect of the invention may contain dark tobacco, milled tobacco, or include a flavoring component.

[0083] The invention also features a method of making a tobacco product, e.g., a smokeless tobacco product, containing (i) reduced expression of a nicotine demethylase or (ii) a nicotine demethylase having altered (e.g., reduced) enzymatic activity, and a reduced amount of a nitrosamine. This method involves providing a cured tobacco plant or plant component containing (i) a reduced level of nicotine demethylase or (ii) a nicotine demethylase having an altered enzymatic activity and a reduced amount of a nitrosamine and preparing the tobacco product from the cured tobacco plant or plant component.

### DEFINITIONS

[0084] “Enzymatic activity” is meant to include but is not limited to demethylation, hydroxylation, epoxidation, N-oxidation, sulfooxidation, N—, S—, and O-dealkylations, desulfation, deamination, and reduction of azo, nitro, N-oxide, and other such enzymatically reactive chemical groups. Altered enzymatic activity refers to a decrease in enzymatic activity (for example, of a tobacco nicotine demethylase) by at least 10-20%, preferably by at least 25-50%, and more preferably by at least 55-95% or greater relative to the activity of a control enzyme (for example, a wild-type tobacco plant tobacco nicotine demethylase). The activity of an enzyme, such as a nicotine demethylase may be assayed using methods standard in the art, for example, using the yeast microsome assays described herein.

[0085] The term “nucleic acid” refers to a deoxyribonucleotide or ribonucleotide polymer in either single- or double-stranded form, or sense or anti-sense, and unless otherwise limited, encompasses known analogues of natural nucleotides that hybridize to nucleic acids in a manner similar to naturally occurring nucleotides. Unless otherwise indicated, a particular nucleic acid sequence includes the complementary sequence thereof. The terms “operably linked,” “in operable combination,” and “in operable order” refer to functional linkage between a nucleic acid expression control sequence (such as a promoter, signal sequence, or array of transcription factor binding sites) and a second nucleic acid sequence, wherein the expression control sequence affects transcription and/or translation of the nucleic acid corresponding to the second sequence. Desirably, an operably linked nucleic acid sequence refers to a fragment of a gene that is linked to other sequences of the same gene to form a full-length gene.

[0086] The term “recombinant” when used with reference to a cell indicates that the cell replicates a heterologous nucleic acid, expresses the nucleic acid or expresses a peptide, heterologous peptide, or protein encoded by a heterologous nucleic acid. Recombinant cells can express genes or gene fragments in either the sense or antisense form or an RNA molecule capable of inducing RNA interference (RNAi) that are not found within the native (non-recombinant) form of the cell. Recombinant cells can also express genes that are found in the native form of the cell, but wherein the genes are modified and re-introduced into the cell by artificial means.

[0087] A “structural gene” is that portion of a gene comprising a DNA segment encoding a protein, polypeptide or a portion thereof, and excluding, for example, the 5′ sequence which drives the initiation of transcription or the 3′UTR. The structural gene may alternatively encode a nontranslatable product. The structural gene may be one which is normally found in the cell or one which is not normally found in the cell or cellular location wherein it is introduced, in which case it is termed a “heterologous gene.” A heterologous gene may be derived in whole or in part from any source known to the art, including a bacterial genome or episome, eukaryotic, nuclear or plasmid DNA, cDNA, viral DNA or chemically synthesized DNA. A structural gene may contain one or more modifications that could affect biological activity or its characteristics, the biological activity or the chemical structure of the expression product, the rate of expression or the manner of expression control. Such modifications include, but are not limited to, mutations, insertions, deletions and substitutions of one or more nucleotides.

[0088] The structural gene may constitute an uninterrupted coding sequence or it may include one or more introns, bounded by the appropriate splice junctions. The structural gene may be translatable or non-translatable, including an antisense or an RNA molecule capable of inducing RNA interference (RNAi). The structural gene may be a composite of segments derived from a plurality of sources and from a plurality of gene sequences (naturally occurring or synthetic, where synthetic refers to DNA that is chemically synthesized).

[0089] An “exon” as used herein in reference to a nucleic acid sequence is meant a portion of the nucleic acid sequence of a gene, where the nucleic acid sequence of the exon encodes at least one amino acid of the gene product. An exon is typically adjacent to a noncoding DNA segment such as an intron.

[0090] An “intron” as used herein in reference to a nucleic acid sequence is meant a non-coding region of a gene that is flanked by coding regions. An intron is typically a noncoding region of a gene that is transcribed into an RNA molecule but is then excised by RNA splicing during production of the messenger RNA or other functional structural RNA.

[0091] A “3′UTR” as used herein in reference to a nucleic acid sequence is meant a non-coding nucleic acid sequence proximal to a stop codon of an exon.

[0092] “Derived from” is used to mean taken, obtained, received, traced, replicated or descended from a source (chemical and/or biological). A derivative may be produced by chemical or biological manipulation (including, but not limited to, substitution, addition, insertion, deletion, extraction, isolation, mutation, and replication) of the original source.

[0093] “Chemically synthesized,” as related to a sequence of DNA, means that portions of the component nucleotides were assembled in vitro. Manual chemical synthesis of DNA may be accomplished using well-established procedures (Caruthers, Methodology of DNA and RNA Sequencing, (1983), Weissman (ed.), Praeger Publishers, New York, Chapter 1); automated chemical synthesis can be performed using one of a number of commercially available machines.

[0094] Optimal alignment of sequences for comparison may be conducted, for example, by the local homology algorithm of Smith and Waterman, Adv. Appl. Math. 2:482 (1981), by the homology alignment algorithm of Needleman and Wunsch, J. Mol. Biol. 48:443 (1970), by the search for similarity method of Pearson and Lipman Proc. Natl. Acad. Sci. (U.S.A.) 85: 2444 (1988), by computerized implementations of these algorithms (GAP, BESTFIT, FASTA, and TFASTA in the Wisconsin Genetics Software Package, Genetics Computer Group, 575 Science Dr., Madison, Wis.), or by inspection.

[0095] The NCBI Basic Local Alignment Search Tool (BLAST) (Altschul et al., 1990) is available from several sources, including the National Center for Biological Information (NCBI, Bethesda, Md.) and on the internet, for use in connection with the sequence analysis programs blastp, blastn, blastx, tblastn, and tblastx. It can be accessed at http:/www.ncbi.nlm.nih.gov/BLAST/. A description of how to determine sequence identity using this program is available at http:/www.ncbi.nlm.nih.gov/BLAST/blast help.html.

[0096] The terms “substantial amino acid identity” or “substantial amino acid sequence identity” as applied to amino acid sequences and as used herein denote a characteristic of a polypeptide, wherein the peptide comprises a sequence that has at least 70 percent sequence identity, preferably 80 percent amino acid sequence identity, more preferably 90 percent amino acid sequence identity, and most preferably at least 99 to 100 percent sequence identity as compared to the protein sequence shown in FIGS. 10 to 159, 160A to 160E, 162 to 170, and 172-1 to 172-19. Desirably, for a nicotine demethylase, sequence comparison is desirably compared for a region following the cytochrome p450 motif GXRXCX(G/A) (SEQ ID NO:2265) to the stop codon of the translated peptide.

[0097] The terms “substantial nucleic acid identity” or “substantial nucleic acid sequence identity” as applied to nucleic acid sequences and as used herein denote a characteristic of a polynucleotide sequence, wherein the polynucleotide comprises a sequence that has at least 50 percent, preferably 60, 65, 70, or 75 percent sequence identity, more preferably 81 or 91 percent nucleic acid sequence identity, and most preferably at least 95, 99, or even 100 percent sequence identity as compared to a reference group over region corresponding to the first nucleic acid following the region encoding the cytochrome p450 motif GXRXCX(G/A) (SEQ ID NO:2265) to the stop codon of the translated peptide.

[0098] Another indication that nucleotide sequences are substantially identical is if two molecules hybridize to each other under stringent conditions. Stringent conditions are sequence-dependent and will be different in different circumstances. Generally, stringent conditions are selected to be about 5° C. to about 20° C., usually about 10° C. to about 15° C., lower than the thermal melting point (Tm) for the specific sequence at a defined ionic strength and pH. The Tm is the temperature (under defined ionic strength and pH) at which 50% of the target sequence hybridizes to a matched probe. Typically, stringent conditions will be those in which the salt concentration is about 0.02 molar at pH 7 and the temperature is at least about 60° C. For instance in a standard Southern hybridization procedure, stringent conditions will include an initial wash in 6×SSC at 42° C. followed by one or more additional washes in 0.2×SSC at a temperature of at least about 55° C., typically about 60° C., and often about 65° C.

[0099] Nucleotide sequences are also substantially identical for purposes of this invention when said nucleotide sequences encode polypeptides and/or proteins which are substantially identical. Thus, where one nucleic acid sequence encodes essentially the same polypeptide as a second nucleic acid sequence, the two nucleic acid sequences are substantially identical even if they would not hybridize under stringent conditions due to degeneracy permitted by the genetic code (see, Darnell et al. (1990) Molecular Cell Biology, Second Edition Scientific American Books W. H. Freeman and Company New York for an explanation of codon degeneracy and the genetic code). Protein purity or homogeneity can be indicated by a number of means well known in the art, such as polyacrylamide gel electrophoresis of a protein sample, followed by visualization upon staining. For certain purposes high resolution may be needed and HPLC or a similar means for purification may be used.

[0100] By an antibody that “specifically binds” or “specifically recognizes” a particular polypeptide, such as a tobacco nicotine demethylase, is meant an increased affinity of the antibody for the polypeptide relative to an equal amount of any other protein. Desirable antibodies are antibodies that specifically bind a polypeptide having an amino acid sequence shown in FIG. 1, FIGS. 3 and 4, FIGS. 10 to 158, FIGS. 160A to 160E, FIGS. 162 to 170, or FIGS. 172-1 to 172-19. For example, an antibody that specifically binds to a tobacco nicotine demethylase containing the amino acid sequence of SEQ ID NO:3 desirably has an affinity for its antigen that is least 2-fold, 5-fold, 10-fold, 30-fold, or 100-fold greater than for an equal amount of any other antigen, including related antigens. Binding of an antibody to an antigen, e.g., a tobacco nicotine demethylase, may be determined by any number of standard methods in the art, e.g., Western analysis, ELISA, or co-immunoprecipitation. Antibodies that specifically bind a polypepide, e.g., a nicotine demethylase, are also useful for purifying the polypeptide.

[0101] As used herein, the term “vector” is used in reference to nucleic acid molecules that transfer DNA segment(s) into a cell. A vector may act to replicate DNA and may reproduce independently in a host cell. The term “vehicle” is sometimes used interchangeably with “vector.” The term “expression vector” as used herein refers to a recombinant DNA molecule containing a desired coding sequence and appropriate nucleic acid sequences necessary for the expression of the operably linked coding sequence in a particular host organism. Nucleic acid sequences necessary for expression in prokaryotes usually include a promoter, an operator (optional), and a ribosome binding site, often along with other sequences. Desirably, the promoter includes the sequence of SEQ ID NO:8, or a fragment thereof that drives transcription. Also desirable are promoter sequences that have at least 50%, 60%, 75%, 80%, 90%, 95%, or even 99% sequence identity to the sequence of SEQ ID NO:8 and that drive transcription. Eucaryotic cells are known to utilize promoters, enhancers, and termination and polyadenylation signals, such as the 3′UTR sequence of SEQ ID NO:9. In some instances, it has been observed that plant expression vectors require the presence of plant derived introns, such as the intron having the sequence of SEQ ID NO:7, to have stable expression. As such, the sequence of SEQ ID NO:7, or any other intron having an appropriate RNA splice junction may be used as further described herein. Desirable vectors include a nucleic acid sequences shown in FIGS. 1, 3 to 7, 10 to 158, 162 to 170, 172-1 to 172-19, or 173-1 to 173-294.

[0102] For the purpose of regenerating complete genetically engineered plants with roots, a nucleic acid may be inserted into plant cells, for example, by any technique such as in vivo inoculation or by any of the known in vitro tissue culture techniques to produce transformed plant cells that can be regenerated into complete plants. Thus, for example, the insertion into plant cells may be by in vitro inoculation by pathogenic or non-pathogenic A. tumefaciens. Other such tissue culture techniques may also be employed.

[0103] “Plant tissue,” “plant component” or “plant cell” includes differentiated and undifferentiated tissues of plants, including, but not limited to, roots, shoots, leaves, pollen, seeds, tumor tissue and various forms of cells in culture, such as single cells, protoplasts, embryos and callus tissue. The plant tissue may be in planta or in organ, tissue or cell culture.

[0104] “Plant cell” as used herein includes plant cells in planta and plant cells and protoplasts in culture. “cDNA” or “complementary DNA” generally refers to a single stranded DNA molecule with a nucleotide sequence that is complementary to an unprocessed RNA molecule containing an intron, or a processed mRNA lacking introns. cDNA is formed by the action of the enzyme reverse transcriptase on an RNA template.

[0105] “Tobacco” as used herein includes flue-cured, Virginia, Burley, dark, Oriental, and other types of plant within the genus Nicotiana. Seed of the genus Nicotiana is readily available commercially in the form of Nicotiana tabacum.

[0106] “Articles of manufacture” or “tobacco products” include products such as moist and dry snuff, chewing tobaccos, cigarette products, cigar products, cigarillos, pipe tobaccos, bidis, and similar tobacco-derived products.

[0107] By “gene silencing” is meant a decrease in the level of gene expression (for example, expression of a gene encoding a tobacco nicotine demethylase) by at least 30-50%, preferably by at least 50-80%, and more preferably by at least 80-95% or greater relative to the level in a control plant (for example, a wild-type tobacco plant). Reduction of such expression levels may be accomplished by employing standard methods which are known in the art including, without limitation, RNA interference, triple strand interference, ribozymes, homologous recombination, virus-induced gene silencing, antisense and co-suppression technologies, expression of a dominant negative gene product, or through the generation of mutated genes using standard mutagenesis techniques, such as those described herein. Levels of a tobacco nicotine demethylase polypeptide or transcript, or both, are monitored according to any standard technique including, but not limited to, Northern blotting, RNase protection, or immunoblotting.

[0108] By a “fragment” or “portion” of an amino acid sequence is meant at least e.g., 20, 15, 30, 50, 75, 100, 250, 300, 400, or 500 contiguous amino acids of any of the amino acid sequences shown in FIGS. 1, 3, 4, 10 to 158, 160A to 160E, 162 to 170, and 172-1 to 172-19. Exemplary desirable fragments are amino acids 1-313 of the sequence of SEQ ID NO:3 and amino acids 314-517 of the sequence of SEQ ID NO:3, as well as the sequence of SEQ ID NOS:2 and 63. In addition, with respect to a fragment or portion of a nucleic acid sequence, desirable fragments include at least 100, 250, 500, 750, 1000, or 1500 contiguous nucleic acids of any of the nucleic acid sequences shown in FIGS. 1, 3 to 7, 10 to 158, 162 to 170, 172-1 to 172-19, and 173-1 to 173-294. Exemplary desirable fragments are nucleic acids 1-2009, 2010-2949, 2950-3946, 3947-4562, 4563-6347, and 4731-6347 of the sequence of SEQ ID NO:4.

[0109] By a “substantially pure polypeptide” is meant a polypeptide that has been separated from most components which naturally accompany it; however, other proteins found in the microsomal fraction associated with a preparation having an enzymatic activity of at least 8.3 pKat/mg protein is also considered to be a substantially pure polypeptide. Typically, the polypeptide is substantially pure when it is at least 60%, by weight, free from the proteins and naturally-occurring organic molecules with which it is naturally associated. Preferably, the preparation is at least 75%, more preferably at least 90%, and most preferably at least 99%, by weight, the desirable polypeptide. A substantially pure polypeptide may be obtained, for example, by extraction from a natural source (for example, a tobacco plant cell); by expression of a recombinant nucleic acid encoding the polypeptide; or by chemically synthesizing the protein. Purity can be measured by any appropriate method, for example, column chromatography, polyacrylamide gel electrophoresis, or by HPLC analysis.

[0110] By “isolated nucleic acid molecule.” is meant a nucleic acid sequence free from the nucleic acid sequences that naturally flank the sequence of the nucleic acid molecule in the genome of an organism.

[0111] By “transformed cell” is meant a cell into which (or into an ancestor of which) has been introduced, by means of recombinant DNA techniques, a DNA molecule, for example, a DNA molecule encoding a tobacco nicotine demethylase or any of the nucleic acid sequences disclosed herein (e.g., the nucleic acid sequences shown in FIGS. 1, 3 to 7, 10 to 158, 162 to 170, 172-1 to 172-19, and 173-1 to 173-294).

[0112] By a “tobacco nicotine demethylase” or “nicotine demethylase” as used herein, is meant a polypeptide that is substantially identical to the sequence of SEQ ID NO:3. Desirably, a tobacco nicotine demethylase is capable of converting nicotine (C₁₀H₁₄N₂, also referred to as 3-(1-methyl-2-pyrrolidinyl)pyridine) to nornicotine (C₉H₁₂N₂). The activity of a tobacco nicotine demethylase may be assayed using methods standard in the art, such as by measuring the demethylation of radioactive nicotine by yeast-expressed microsomes, as described herein.

[0113] As provided herein, the terms “cytochrome p450” and “p450” are used interchangeably.

[0114] Other features and advantages of the invention will be apparent from the following Detailed Description, the drawings, and the claims.

### BRIEF DESCRIPTION OF THE DRAWINGS

[0115] FIG. 1 is the nucleic acid sequence of D35-BG11 (SEQ ID NO:1) and its translation product (SEQ ID NO:2).

[0116] FIG. 2 is a schematic diagram of the genomic structure of the tobacco nicotine demethylase gene.

[0117] FIG. 3 is the genomic tobacco nicotine demethylase nucleic acid sequence (SEQ ID NO:4) and its translation product (SEQ ID NO:3)

[0118] FIG. 4 is the nucleic acid sequence of the coding region of the tobacco nicotine demethylase gene (SEQ ID NO:5), and its translation product (SEQ ID NO:6).

[0119] FIG. 5 is the nucleic acid sequence of an intron (SEQ ID NO:7) present in the tobacco nicotine demethylase genomic sequence.

[0120] FIG. 6 is the nucleic acid sequence of the tobacco demethylase gene promoter (SEQ ID NO:8).

[0121] FIG. 7 is the nucleic acid sequence of the 3′UTR of the tobacco nicotine demethylase gene (SEQ ID NO:9).

[0122] FIG. 8 is an electrophoresis image showing PCR products of tobacco lines with the Geno full-length (“FL”) primer set.

[0123] FIG. 9 is an electrophoresis image showing PCR products of tobacco lines with primer sets (1), (2), (3), and (4) as stated in Example 17. The approximate sizes of the bands are 3,500 nucleotides (nt) for FL, 2,600 nt for (1), 1,400 nt for (2), 600 nt for (3), and 1,400 nt for (4).

[0124] FIG. 10 is the nucleic acid sequence of D58-BG7 (SEQ ID NO:10), and the amino acid sequence of D58-BG7 (SEQ ID NO:11), which is the translation of D58-BG7 (SEQ ID NO:10).

[0125] FIG. 11 is the nucleic acid sequence of D58-AB1 (SEQ ID NO:12), and the amino acid sequence of D58-AB1 (SEQ ID NO:13), which is the translation of D58-AB1 (SEQ ID NO:12).

[0126] FIG. 12 is the nucleic acid sequence of D186-AH4 (SEQ ID NO:14), and the amino acid sequence of D186-AH4 (SEQ ID NO:15), which is the translation of D186-AH4 (SEQ ID NO:14).

[0127] FIG. 13 is the nucleic acid sequence of D58-BE4 (SEQ ID NO:16), and the amino acid sequence of D58-BE4 (SEQ ID NO:17), which is the translation of D58-BE4 (SEQ ID NO:16).

[0128] FIG. 14 is the nucleic acid sequence of D56-AH7 (SEQ ID NO:18), and the amino acid sequence of D56-AH7 (SEQ ID NO:19), which is the translation of D56-AH7 (SEQ ID NO:18).

[0129] FIG. 15 is the nucleic acid sequence of D13a-5 (SEQ ID NO:20), and the amino acid sequence of D13a-5 (SEQ ID NO:21), which is the translation of D13a-5 (SEQ ID NO:20).

[0130] FIG. 16 is the nucleic acid sequence of D56-AG10 (SEQ ID NO:22), and the amino acid sequence of D56-AG10 (SEQ ID NO:23), which is the translation of D56-AG10 (SEQ ID NO:22).

[0131] FIG. 17 is the nucleic acid sequence of D35-33 (SEQ ID NO:24), and the amino acid sequence of D35-33 (SEQ ID NO:25), which is the translation of D35-33 (SEQ ID NO:24).

[0132] FIG. 18 is the nucleic acid sequence of D34-62 (SEQ ID NO:26), and the amino acid sequence of D34-62 (SEQ ID NO:27), which is the translation of D34-62 (SEQ ID NO:26).

[0133] FIG. 19 is the nucleic acid sequence of D56-AA7 (SEQ ID NO:28), and the amino acid sequence of D56-AA7 (SEQ ID NO:29), which is the translation of D56-AA7 (SEQ ID NO:28).

[0134] FIG. 20 is the nucleic acid sequence of D56-AE1 (SEQ ID NO:30), and the amino acid sequence of D56-AE1 (SEQ ID NO:31), which is the translation of D56-AE1 (SEQ ID NO:30).

[0135] FIG. 21 is the nucleic acid sequence of D35-BB7 (SEQ ID NO:32), and the amino acid sequence of D35-BB7 (SEQ ID NO:33), which is the translation of D35-BB7 (SEQ ID NO:32).

[0136] FIG. 22 is the nucleic acid sequence of D177-BA7 (SEQ ID NO:34), and the amino acid sequence of D177-BA7 (SEQ ID NO:35), which is the translation of D177-BA7 (SEQ ID NO:34).

[0137] FIG. 23 is the nucleic acid sequence of D56A-AB6 (SEQ ID NO:36), and the amino acid sequence of D56A-AB6 (SEQ ID NO:37), which is the translation of D56A-AB6 (SEQ ID NO:36).

[0138] FIG. 24 is the nucleic acid sequence of D144-AE2 (SEQ ID NO:38), and the amino acid sequence of D144-AE2 (SEQ ID NO:39), which is the translation of D144-AE2 (SEQ ID NO:38).

[0139] FIG. 25 is the nucleic acid sequence of D56-AG11 (SEQ ID NO:40), and the amino acid sequence of D56-AG11 (SEQ ID NO:41), which is the translation of D56-AG11 (SEQ ID NO:40).

[0140] FIG. 26 is the nucleic acid sequence of D179-AA1 (SEQ ID NO:42), and the amino acid sequence of D179-AA1 (SEQ ID NO:43), which is the translation of D179-AA1 (SEQ ID NO:42).

[0141] FIG. 27 is the nucleic acid sequence of D56-AC7 (SEQ ID NO:44), and the amino acid sequence of D56-AC7 (SEQ ID NO:45), which is the translation of D56-AC7 (SEQ ID NO:44).

[0142] FIG. 28 is the nucleic acid sequence of D144-AD1 (SEQ ID NO:46), and the amino acid sequence of D144-AD1 (SEQ ID NO:47), which is the translation of D144-AD1 (SEQ ID NO:46).

[0143] FIG. 29 is the nucleic acid sequence of D144-AB5 (SEQ ID NO:48), and the amino acid sequence of D144-AB5 (SEQ ID NO:49), which is the translation of D144-AB5 (SEQ ID NO:48).

[0144] FIG. 30 is the nucleic acid sequence of D181-AB5 (SEQ ID NO:50), and the amino acid sequence of D181-AB5 (SEQ ID NO:51), which is the translation of D181-AB5 (SEQ ID NO:50).

[0145] FIG. 31 is the nucleic acid sequence of D73-AC9 (SEQ ID NO:52), and the amino acid sequence of D73-AC9 (SEQ ID NO:53), which is the translation of D73-AC9 (SEQ ID NO:52).

[0146] FIG. 32 is the nucleic acid sequence of D56-AC12 (SEQ ID NO:54), and the amino acid sequence of D56-AC12 (SEQ ID NO:55), which is the translation of D56-AC12 (SEQ ID NO:54).

[0147] FIG. 33 is the nucleic acid sequence of D58-AB9 (SEQ ID NO:56), and the amino acid sequence of D58-AB9 (SEQ ID NO:57), which is the translation of D58-AB9 (SEQ ID NO:56).

[0148] FIG. 34 is the nucleic acid sequence of D56-AG9 (SEQ ID NO:58), and the amino acid sequence of D56-AG9 (SEQ ID NO:59), which is the translation of D56-AG9 (SEQ ID NO:58).

[0149] FIG. 35 is the nucleic acid sequence of D56-AG6 (SEQ ID NO:60), and the amino acid sequence of D56-AG6 (SEQ ID NO:61), which is the translation of D56-AG6 (SEQ ID NO:60).

[0150] FIG. 36 is the nucleic acid sequence of D35-BG11 (SEQ ID NO:62), and the amino acid sequence of D35-BG11 (SEQ ID NO:63), which is the translation of D35-BG11 (SEQ ID NO:62).

[0151] FIG. 37 is the nucleic acid sequence of D35-42 (SEQ ID NO:64), and the amino acid sequence of D35-42 (SEQ ID NO:65), which is the translation of D35-42 (SEQ ID NO:64).

[0152] FIG. 38 is the nucleic acid sequence of D35-BA3 (SEQ ID NO:66), and the amino acid sequence of D35-BA3 (SEQ ID NO:67), which is the translation of D35-BA3 (SEQ ID NO:66).

[0153] FIG. 39 is the nucleic acid sequence of D34-57 (SEQ ID NO:68), and the amino acid sequence of D34-57 (SEQ ID NO:69), which is the translation of D34-57 (SEQ ID NO:68).

[0154] FIG. 40 is the nucleic acid sequence of D34-52 (SEQ ID NO:70), and the amino acid sequence of D34-52 (SEQ ID NO:71), which is the translation of D34-52 (SEQ ID NO:70).

[0155] FIG. 41 is the nucleic acid sequence of D34-25 (SEQ ID NO:72), and the amino acid sequence of D34-25 (SEQ ID NO:73), which is the translation of D34-25 (SEQ ID NO:72).

[0156] FIG. 42 is the nucleic acid sequence of D56AD10 (SEQ ID NO:74), and the amino acid sequence of D56AD10 (SEQ ID NO:75), which is the translation of D56AD10 (SEQ ID NO:74).

[0157] FIG. 43 is the nucleic acid sequence of D56-AA11 (SEQ ID NO:76), and the amino acid sequence of D56-AA11 (SEQ ID NO:77), which is the translation of D56-AA11 (SEQ ID NO:76).

[0158] FIG. 44 is the nucleic acid sequence of D177-BD5 (SEQ ID NO:78), and the amino acid sequence of D177-BD5 (SEQ ID NO:79), which is the translation of D177-BD5 (SEQ ID NO:78).

[0159] FIG. 45 is the nucleic acid sequence of D56A-AG10 (SEQ ID NO:80), and the amino acid sequence of D56A-AG10 (SEQ ID NO:81), which is the translation of D56A-AG10 (SEQ ID NO:80).

[0160] FIG. 46 is the nucleic acid sequence of D58-BC5 (SEQ ID NO:82), and the amino acid sequence of D58-BC5 (SEQ ID NO:83), which is the translation of D58-BC5 (SEQ ID NO:82).

[0161] FIG. 47 is the nucleic acid sequence of D58-AD12 (SEQ ID NO:84), and the amino acid sequence of D58-AD12 (SEQ ID NO:85), which is the translation of D58-AD12 (SEQ ID NO:84).

[0162] FIG. 48 is the nucleic acid sequence of D56-AC11 (SEQ ID NO:86), and the amino acid sequence of D56-AC11 (SEQ ID NO:87), which is the translation of D56-AC11 (SEQ ID NO:86).

[0163] FIG. 49 is the nucleic acid sequence of D35-39 (SEQ ID NO:88), and the amino acid sequence of D35-39 (SEQ ID NO:89), which is the translation of D35-39 (SEQ ID NO:88).

[0164] FIG. 50 is the nucleic acid sequence of D58-BH4 (SEQ ID NO:90), and the amino acid sequence of D58-BH4 (SEQ ID NO:91), which is the translation of D58-BH4 (SEQ ID NO:90).

[0165] FIG. 51 is the nucleic acid sequence of D177-BD7 (SEQ ID NO:92), and the amino acid sequence of D177-BD7 (SEQ ID NO:93), which is the translation of D177-BD7 (SEQ ID NO:92).

[0166] FIG. 52 is the nucleic acid sequence of D176-BF2 (SEQ ID NO:94), and the amino acid sequence of D176-BF2 (SEQ ID NO:95), which is the translation of D176-BF2 (SEQ ID NO:94).

[0167] FIG. 53 is the nucleic acid sequence of D56-AD6 (SEQ ID NO:96), and the amino acid sequence of D56-AD6 (SEQ ID NO:97), which is the translation of D56-AD6 (SEQ ID NO:96).

[0168] FIG. 54 is the nucleic acid sequence of D73A-AD6 (SEQ ID NO:98), and the amino acid sequence of D73A-AD6 (SEQ ID NO:99), which is the translation of D73A-AD6 (SEQ ID NO:98).

[0169] FIG. 55 is the nucleic acid sequence of D70A-BA11 (SEQ ID NO:100), and the amino acid sequence of D70A-BA11 (SEQ ID NO:101), which is the translation of D70A-BA11 (SEQ ID NO:100).

[0170] FIG. 56 is the nucleic acid sequence of D70A-BB5 (SEQ ID NO:102), and the amino acid sequence of D70A-BB5 (SEQ ID NO:103), which is the translation of D70A-BB5 (SEQ ID NO:102).

[0171] FIG. 57 is the nucleic acid sequence of D70A-AB5 (SEQ ID NO:104), and the amino acid sequence of D70A-AB5 (SEQ ID NO:105), which is the translation of D70A-AB5 (SEQ ID NO:104).

[0172] FIG. 58 is the nucleic acid sequence of D70A-AA8 (SEQ ID NO:106), and the amino acid sequence of D70A-AA8 (SEQ ID NO:107), which is the translation of D70A-AA8. (SEQ ID NO:106).

[0173] FIG. 59 is the nucleic acid sequence of D70A-AB8 (SEQ ID NO:108), and the amino acid sequence of D70A-AB8 (SEQ ID NO:109), which is the translation of D70A-AB8 (SEQ ID NO:108).

[0174] FIG. 60 is the nucleic acid sequence of D70A-BH2 (SEQ ID NO:110), and the amino acid sequence of D70A-BH2 (SEQ ID NO:111), which is the translation of D70A-BH2 (SEQ ID NO:110).

[0175] FIG. 61 is the nucleic acid sequence of D70A-AA4 (SEQ ID NO:112), and the amino acid sequence of D70A-AA4 (SEQ ID NO:113), which is the translation of D70A-AA4 (SEQ ID NO:112).

[0176] FIG. 62 is the nucleic acid sequence of D70A-BA1 (SEQ ID NO:114), and the amino acid sequence of D70A-BA1 (SEQ ID NO:115), which is the translation of D70A-BA1 (SEQ ID NO:114).

[0177] FIG. 63 is the nucleic acid sequence of D70A-BA9 (SEQ ID NO:116), and the amino acid sequence of D70A-BA9 (SEQ ID NO:117), which is the translation of D70A-BA9 (SEQ ID NO:116).

[0178] FIG. 64 is the nucleic acid sequence of D70A-BD4 (SEQ ID NO:118), and the amino acid sequence of D70A-BD4 (SEQ ID NO:119), which is the translation of D70A-BD4 (SEQ ID NO:118).

[0179] FIG. 65 is the nucleic acid sequence of D181-AC5 (SEQ ID NO:120), and the amino acid sequence of D181-AC5 (SEQ ID NO:121), which is the translation of D181-AC5 (SEQ ID NO:120).

[0180] FIG. 66 is the nucleic acid sequence of D144-AH1 (SEQ ID NO:122), and the amino acid sequence of D144-AH1 (SEQ ID NO:123), which is the translation of D144-AH1 (SEQ ID NO:122).

[0181] FIG. 67 is the nucleic acid sequence of D34-65 (SEQ ID NO:124), and the amino acid sequence of D34-65 (SEQ ID NO:125), which is the translation of D34-65 (SEQ ID NO:124).

[0182] FIG. 68 is the nucleic acid sequence of D35-BG2 (SEQ ID NO:126), and the amino acid sequence of D35-BG2 (SEQ ID NO:127), which is the translation of D35-BG2 (SEQ ID NO:126).

[0183] FIG. 69 is the nucleic acid sequence of D73A-AH7 (SEQ ID NO:128), and the amino acid sequence of D73A-AH7 (SEQ ID NO:129), which is the translation of D73A-AH7 (SEQ ID NO:128).

[0184] FIG. 70 is the nucleic acid sequence of D58-AA1 (SEQ ID NO:130), and the amino acid sequence of D58-AA1 (SEQ ID NO:131), which is the translation of D58-AA1 (SEQ ID NO:130).

[0185] FIG. 71 is the nucleic acid sequence of D73A-AE10 (SEQ ID NO:132), and the amino acid sequence of D73A-AE10 (SEQ ID NO:133), which is the translation of D73A-AE10 (SEQ ID NO:132).

[0186] FIG. 72 is the nucleic acid sequence of D56A-AC12 (SEQ ID NO:134), and the amino acid sequence of D56A-AC12 (SEQ ID NO:135), which is the translation of D56A-AC12 (SEQ ID NO:134).

[0187] FIG. 73 is the nucleic acid sequence of D177-BF7 (SEQ ID NO:136), and the amino acid sequence of D177-BF7 (SEQ ID NO:137), which is the translation of D177-BF7 (SEQ ID NO:136).

[0188] FIG. 74 is the nucleic acid sequence of D73A-AG3 (SEQ ID NO:138), and the amino acid sequence of D73A-AG3 (SEQ ID NO:139), which is the translation of D73A-AG3 (SEQ ID NO:138).

[0189] FIG. 75 is the nucleic acid sequence of D70A-AA12 (SEQ ID NO:140), and the amino acid sequence of D70A-AA12 (SEQ ID NO:141), which is the translation of D70A-AA12 (SEQ ID NO:140).

[0190] FIG. 76 is the nucleic acid sequence of D185-BC1 (SEQ ID NO:142), and the amino acid sequence of D185-BC1 (SEQ ID NO:143), which is the translation of D185-BC1 (SEQ ID NO:142).

[0191] FIG. 77 is the nucleic acid sequence of D185-BG2 (SEQ ID NO:144), and the amino acid sequence of D185-BG2 (SEQ ID NO:145), which is the translation of D185-BG2 (SEQ ID NO:144).

[0192] FIG. 78 is the nucleic acid sequence of D185-BE1 (SEQ ID NO:146), and the amino acid sequence of D185-BE1 (SEQ ID NO:147), which is the translation of D185-BE1 (SEQ ID NO:146).

[0193] FIG. 79 is the nucleic acid sequence of D185-BD2 (SEQ ID NO:148), and the amino acid sequence of D185-BD2 (SEQ ID NO:149), which is the translation of D185-BD2 (SEQ ID NO:148).

[0194] FIG. 80 is the nucleic acid sequence of D176-BG2 (SEQ ID NO:150), and the amino acid sequence of D176-BG2 (SEQ ID NO:151), which is the translation of D176-BG2 (SEQ ID NO:150).

[0195] FIG. 81 is the nucleic acid sequence of D185-BD3 (SEQ ID NO:152), and the amino acid sequence of D185-BD3 (SEQ ID NO:153), which is the translation of D185-BD3 (SEQ ID NO:152).

[0196] FIG. 82 is the nucleic acid sequence of D176-BC3 (SEQ ID NO:154), and the amino acid sequence of D176-BC3 (SEQ ID NO:155), which is the translation of D176-BC3 (SEQ ID NO:154).

[0197] FIG. 83 is the nucleic acid sequence of D176-BB3 (SEQ ID NO:156), and the amino acid sequence of D176-BB3 (SEQ ID NO:157), which is the translation of D176-BB3 (SEQ ID NO:156).

[0198] FIG. 84 is the nucleic acid sequence of D89-AB1 (SEQ ID NO:158), and the amino acid sequence of D89-AB1 (SEQ ID NO:159), which is the translation of D89-AB1 (SEQ ID NO:158).

[0199] FIG. 85 is the nucleic acid sequence of D89-AD2 (SEQ ID NO:160), and the amino acid sequence of D89-AD2 (SEQ ID NO:161), which is the translation of D89-AD2 (SEQ ID NO:160).

[0200] FIG. 86 is the nucleic acid sequence of D90A-BB3 (SEQ ID NO:162), and the amino acid sequence of D90A-BB3 (SEQ ID NO:163), which is the translation of D90A-BB3 (SEQ ID NO:162).

[0201] FIG. 87 is the nucleic acid sequence of D95-AG1 (SEQ ID NO:164), and the amino acid sequence of D95-AG1 (SEQ ID NO:165), which is the translation of D95-AG1 (SEQ ID NO:164).

[0202] FIG. 88 is the nucleic acid sequence of D96-AB6 (SEQ ID NO:166), and the amino acid sequence of D96-AB6 (SEQ ID NO:167), which is the translation of D96-AB6 (SEQ ID NO:166).

[0203] FIG. 89 is the nucleic acid sequence of D96-AC2 (SEQ ID NO:168), and the amino acid sequence of D96-AC2 (SEQ ID NO:169), which is the translation of D96-AC2 (SEQ ID NO:168).

[0204] FIG. 90 is the nucleic acid sequence of D98-AA1 (SEQ ID NO:170), and the amino acid sequence of D98-AA1 (SEQ ID NO:171), which is the translation of D98-AA1 (SEQ ID NO:170).

[0205] FIG. 91 is the nucleic acid sequence of D98-AG1 (SEQ ID NO:172), and the amino acid sequence of D98-AG1 (SEQ ID NO:173), which is the translation of D98-AG1 (SEQ ID NO:172).

[0206] FIG. 92 is the nucleic acid sequence of D100-BE2 (SEQ ID NO:174), and the amino acid sequence of D100-BE2 (SEQ ID NO:175), which is the translation of D100-BE2 (SEQ ID NO:174).

[0207] FIG. 93 is the nucleic acid sequence of D100A-AC3 (SEQ ID NO:176), and the amino acid sequence of D100A-AC3 (SEQ ID NO:177), which is the translation of D100A-AC3 (SEQ ID NO:176).

[0208] FIG. 94 is the nucleic acid sequence of D104A-AE8 (69,1755) (SEQ ID NO:178), and the amino acid sequence of D104A-AE8 (69,1755) (SEQ ID NO:179), which is the translation of D104A-AE8 (69,1755) (SEQ ID NO:178).

[0209] FIG. 95 is the nucleic acid sequence of D105-AD6 (SEQ ID NO:180), and the amino acid sequence of D105-AD6 (SEQ ID NO:181), which is the translation of D105-AD6 (SEQ ID NO:180).

[0210] FIG. 96 is the nucleic acid sequence of D109-AH8 (14,1697) (SEQ ID NO:182), and the amino acid sequence of D109-AH8 (14,1697) (SEQ ID NO:183), which is the translation of D109-AH8 (14,1697) (SEQ ID NO:182).

[0211] FIG. 97 is the nucleic acid sequence of D110-AF12 (166,1631) (SEQ ID NO:184), and the amino acid sequence of D110-AF12 (166,1631) (SEQ ID NO:185), which is the translation of D100-AF12 (166,1631) (SEQ ID NO:184).

[0212] FIG. 98 is the nucleic acid sequence of D112-AA5 (SEQ ID NO:186), and the amino acid sequence of D112-AA5 (SEQ ID NO:187), which is the translation of D112-AA5 (SEQ ID NO:186).

[0213] FIG. 99 is the nucleic acid sequence of D120-AH4 (SEQ ID NO:188), and the amino acid sequence of D120-AH4 (SEQ ID NO:189), which is the translation of D120-AH4 (SEQ ID NO:188).

[0214] FIG. 100 is the nucleic acid sequence of D121-AA8 (SEQ ID NO:190), and the amino acid sequence of D121-AA8 (SEQ ID NO:191), which is the translation of D121-AA8 (SEQ ID NO:190).

[0215] FIG. 101 is the nucleic acid sequence of D122-AF10 (SEQ ID NO:192), and the amino acid sequence of D122-AF10 (SEQ ID NO:193), which is the translation of D122-AF10 (SEQ ID NO:192).

[0216] FIG. 102 is the nucleic acid sequence of D128-AB7 (SEQ ID NO:194), and the amino acid sequence of D128-AB7 (SEQ ID NO:195), which is the translation of D128-AB7 (SEQ ID NO:194).

[0217] FIG. 103 is the nucleic acid sequence of D129-AD10 (SEQ ID NO:196), and the amino acid sequence of D129-AD10 (SEQ ID NO:197), which is the translation of D129-AD10 (SEQ ID NO:196).

[0218] FIG. 104 is the nucleic acid sequence of D135-AE1 (SEQ ID NO:198), and the amino acid sequence of D135-AE1 (SEQ ID NO:199), which is the translation of D135-AE1 (SEQ ID NO:198).

[0219] FIG. 105 is the nucleic acid sequence of D141-AD7 (SEQ ID NO:200), and the amino acid sequence of D141-AD7 (SEQ ID NO:201), which is the translation of D141-AD7 (SEQ ID NO:200).

[0220] FIG. 106 is the nucleic acid sequence of D147-AD3 (SEQ ID NO:202), and the amino acid sequence of D147-AD3 (SEQ ID NO:203), which is the translation of D147-AD3 (SEQ ID NO:202).

[0221] FIG. 107 is the nucleic acid sequence of D163-AF12 (SEQ ID NO:204), and the amino acid sequence of D163-AF12 (SEQ ID NO:205), which is the translation of D163-AF12 (SEQ ID NO:204).

[0222] FIG. 108 is the nucleic acid sequence of D163-AG11 (SEQ ID NO:206), and the amino acid sequence of D163-AG11 (SEQ ID NO:207), which is the translation of D163-AG11 (SEQ ID NO:206).

[0223] FIG. 109 is the nucleic acid sequence of D163-AG12 (SEQ ID NO:208), and the amino acid sequence of D163-AG12 (SEQ ID NO:209), which is the translation of D163-AG12 (SEQ ID NO:208).

[0224] FIG. 110 is the nucleic acid sequence of D205-BG9 (SEQ ID NO:210), and the amino acid sequence of D205-BG9 (SEQ ID NO:211), which is the translation of D205-BG9 (SEQ ID NO:210).

[0225] FIG. 111 is the nucleic acid sequence of D207-AA5 (SEQ ID NO:212), and the amino acid sequence of D207-AA5 (SEQ ID NO:213), which is the translation of D207-AA5 (SEQ ID NO:212).

[0226] FIG. 112 is the nucleic acid sequence of D207-AB4 (SEQ ID NO:214), and the amino acid sequence of D207-AB4 (SEQ ID NO:215), which is the translation of D207-AB4 (SEQ ID NO:214).

[0227] FIG. 113 is the nucleic acid sequence of D207-AC4 (SEQ ID NO:216), and the amino acid sequence of D207-AC4 (SEQ ID NO:217), which is the translation of D207-AC4 (SEQ ID NO:216).

[0228] FIG. 114 is the nucleic acid sequence of D209-AA10 (SEQ ID NO:218), and the amino acid sequence of D209-AA10 (SEQ ID NO:219), which is the translation of D209-AA10 (SEQ ID NO:218).

[0229] FIG. 115 is the nucleic acid sequence of D209-AA12 (SEQ ID NO:220), and the amino acid sequence of D209-AA12 (SEQ ID NO:221), which is the translation of D209-AA12 (SEQ ID NO:220).

[0230] FIG. 116 is the nucleic acid sequence of D209-AH10 (SEQ ID NO:222), and the amino acid sequence of D209-AH10 (SEQ ID NO:223), which is the translation of D209-AH10 (SEQ ID NO:222).

[0231] FIG. 117 is the nucleic acid sequence of D87A-AF3 (SEQ ID NO:224), and the amino acid sequence of D87A-AF3 (SEQ ID NO:225), which is the translation of D87A-AF3 (SEQ ID NO:224).

[0232] FIG. 118 is the nucleic acid sequence of D208-AC8 (SEQ ID NO:226), and the amino acid sequence of D208-AC8 (SEQ ID NO:227), which is the translation of D208-AC8 (SEQ ID NO:226).

[0233] FIG. 119 is the nucleic acid sequence of D215-AB5 (SEQ ID NO:228), and the amino acid sequence of D215-AB5 (SEQ ID NO:229), which is the translation of D215-AB5 (SEQ ID NO:228).

[0234] FIG. 120 is the nucleic acid sequence of D103-AH3 (SEQ ID NO:230), and the amino acid sequence of D103-AH3 (SEQ ID NO:231), which is the translation of D103-AH3 (SEQ ID NO:230).

[0235] FIG. 121 is the nucleic acid sequence of D208-AD9 (SEQ ID NO:232), and the amino acid sequence of D208-AD9 (SEQ ID NO:233), which is the translation of D208-AD9 (SEQ ID NO:232).

[0236] FIG. 122 is the nucleic acid sequence of D237-AD1 (SEQ ID NO:234), and the amino acid sequence of D237-AD1 (SEQ ID NO:235), which is the translation of D237-AD1 (SEQ ID NO:234).

[0237] FIG. 123 is the nucleic acid sequence of D125-AF11 (SEQ ID NO:236), and the amino acid sequence of D125-AF11 (SEQ ID NO:237), which is the translation of D125-AF11 (SEQ ID NO:236).

[0238] FIG. 124 is the nucleic acid sequence of D134-AE11 (SEQ ID NO:238), and the amino acid sequence of D134-AE11 (SEQ ID NO:239), which is the translation of D134-AE11 (SEQ ID NO:238).

[0239] FIG. 125 is the nucleic acid sequence of D209-AH12 (SEQ ID NO:240), and the amino acid sequence of D209-AH12 (SEQ ID NO:241), which is the translation of D209-AH12 (SEQ ID NO:240).

[0240] FIG. 126 is the nucleic acid sequence of D221-BB8 (SEQ ID NO:242), and the amino acid sequence of D221-BB8 (SEQ ID NO:243), which is the translation of D221-BB8 (SEQ ID NO:242).

[0241] FIG. 127 is the nucleic acid sequence of D222-BH4 (SEQ ID NO:244), and the amino acid sequence of D222-BH4 (SEQ ID NO:245), which is the translation of D222-BH4 (SEQ ID NO:244).

[0242] FIG. 128 is the nucleic acid sequence of D224-AF10 (SEQ ID NO:246), and the amino acid sequence of D224-AF10 (SEQ ID NO:247), which is the translation of D224-AF10 (SEQ ID NO:246).

[0243] FIG. 129 is the nucleic acid sequence of D224-BD11 (SEQ ID NO:248), and the amino acid sequence of D224-BD11 (SEQ ID NO:249), which is the translation of D224-BD11 (SEQ ID NO:248).

[0244] FIG. 130 is the nucleic acid sequence of D228-AD7 (SEQ ID NO:250), and the amino acid sequence of D228-AD7 (SEQ ID NO:251), which is the translation of D228-AD7 (SEQ ID NO:250).

[0245] FIG. 131 is the nucleic acid sequence of D228-AH8 (SEQ ID NO:252), and the amino acid sequence of D228-AH8 (SEQ ID NO:253), which is the translation of D228-AH8 (SEQ ID NO:252).

[0246] FIG. 132 is the nucleic acid sequence of D235-AB1 (SEQ ID NO:254), and the amino acid sequence of D235-AB1 (SEQ ID NO:255), which is the translation of D235-AB1 (SEQ ID NO:254).

[0247] FIG. 133 is the nucleic acid sequence of D243-AA2 (SEQ ID NO:256), and the amino acid sequence of D243-AA2 (SEQ ID NO:257), which is the translation of D243-AA2 (SEQ ID NO:256).

[0248] FIG. 134 is the nucleic acid sequence of D244-AD4 (SEQ ID NO:258), and the amino acid sequence of D244-AD4 (SEQ ID NO:259), which is the translation of D244-AD4 (SEQ ID NO:258).

[0249] FIG. 135 is the nucleic acid sequence of D247-AH1 (SEQ ID NO:260), and the amino acid sequence of D247-AH1 (SEQ ID NO:261), which is the translation of D247-AH1 (SEQ ID NO:260).

[0250] FIG. 136 is the nucleic acid sequence of D248-AA6 (SEQ ID NO:262), and the amino acid sequence of D248-AA6 (SEQ ID NO:263), which is the translation of D248-AA6 (SEQ ID NO:262).

[0251] FIG. 137 is the nucleic acid sequence of D249-AE8 (SEQ ID NO:264), and the amino acid sequence of D249-AE8 (SEQ ID NO:265), which is the translation of D249-AE8 (SEQ ID NO:264).

[0252] FIG. 138 is the nucleic acid sequence of D250-AC11 (SEQ ID NO:266), and the amino acid sequence of D250-AC11 (SEQ ID NO:267), which is the translation of D250-AC11 (SEQ ID NO:266).

[0253] FIG. 139 is the nucleic acid sequence of D259-AB9 (SEQ ID NO:268), and the amino acid sequence of D259-AB9 (SEQ ID NO:269), which is the translation of D259-AB9 (SEQ ID NO:268).

[0254] FIG. 140 is the nucleic acid sequence of D218A-AC2 (SEQ ID NO:270), and the amino acid sequence of D218A-AC2 (SEQ ID NO:271), which is the translation of D218A-AC2 (SEQ ID NO:270).

[0255] FIG. 141 is the nucleic acid sequence of D210-BD4 (SEQ ID NO:272), and the amino acid sequence of D210-BD4 (SEQ ID NO:273), which is the translation of D210-BD4 (SEQ ID NO:272).

[0256] FIG. 142 is the nucleic acid sequence of D233-AG7 (SEQ ID NO:274), and the amino acid sequence of D233-AG7 (SEQ ID NO:275), which is the translation of D233-AG7 (SEQ ID NO:274).

[0257] FIG. 143 is the nucleic acid sequence of D257-AE4 (SEQ ID NO:276), and the amino acid sequence of D257-AE4 (SEQ ID NO:277), which is the translation of D257-AE4 (SEQ ID NO:276).

[0258] FIG. 144 is the nucleic acid sequence of D268-AE2 (SEQ ID NO:278), and the amino acid sequence of D268-AE2 (SEQ ID NO:279), which is the translation of D268-AE2 (SEQ ID NO:278).

[0259] FIG. 145 is the nucleic acid sequence of D283-AC1 (SEQ ID NO:280), and the amino acid sequence of D283-AC1 (SEQ ID NO:281), which is the translation of D283-AC1 (SEQ ID NO:280).

[0260] FIG. 146 is the nucleic acid sequence of D244-AB6 (SEQ ID NO:282), and the amino acid sequence of D244-AB6 (SEQ ID NO:283), which is the translation of D244-AB6 (SEQ ID NO:282).

[0261] FIG. 147 is the nucleic acid sequence of D205-BE9 (SEQ ID NO:284), and the amino acid sequence of D205-BE9 (SEQ ID NO:285), which is the translation of D205-BE9 (SEQ ID NO:284).

[0262] FIG. 148 is the nucleic acid sequence of D136-AF4 (SEQ ID NO:286), and the amino acid sequence of D136-AF4 (SEQ ID NO:287), which is the translation of D136-AF4 (SEQ ID NO:286).

[0263] FIG. 149 is the nucleic acid sequence of D101-BA2 (SEQ ID NO:288), and the amino acid sequence of D101-BA2 (SEQ ID NO:289), which is the translation of D101-BA2 (SEQ ID NO:288).

[0264] FIG. 150 is the nucleic acid sequence of D130-AA1 (SEQ ID NO:290), and the amino acid sequence of D130-AA1 (SEQ ID NO:291), which is the translation of D130-AA1 (SEQ ID NO:290).

[0265] FIG. 151 is the nucleic acid sequence of D136-AD5 (SEQ ID NO:292), and the amino acid sequence of D136-AD5 (SEQ ID NO:293), which is the translation of D136-AD5 (SEQ ID NO:292).

[0266] FIG. 152 is the nucleic acid sequence of D138-AD12 (SEQ ID NO:294), and the amino acid sequence of D138-AD12 (SEQ ID NO:295), which is the translation of D138-AD12 (SEQ ID NO:294).

[0267] FIG. 153 is the nucleic acid sequence of D216-AG8 (SEQ ID NO:296), and the amino acid sequence of D216-AG8 (SEQ ID NO:297), which is the translation of D216-AG8 (SEQ ID NO:296).

[0268] FIG. 154 is the nucleic acid sequence of D243-AB3 (SEQ ID NO:298), and the amino acid sequence of D243-AB3 (SEQ ID NO:299), which is the translation of D243-AB3 (SEQ ID NO:298).

[0269] FIG. 155 is the nucleic acid sequence of D250-AC11 (SEQ ID NO:300), and the amino acid sequence of D250-AC11 (SEQ ID NO:301), which is the translation of D250-AC11 (SEQ ID NO:300).

[0270] FIG. 156 is the nucleic acid sequence of D205-AH4 (SEQ ID NO:302), and the amino acid sequence of D205-AH4 (SEQ ID NO:303), which is the translation of D205-AH4 (SEQ ID NO:302).

[0271] FIG. 157 is the nucleic acid sequence of D267-AF10 (SEQ ID NO:304), and the amino acid sequence of D267-AF10 (SEQ ID NO:305), which is the translation of D267-AF10 (SEQ ID NO:304).

[0272] FIG. 158 is the nucleic acid sequence of D284-AH5 (SEQ ID) NO:306), and the amino acid sequence of D284-AH5 (SEQ ID NO:307), which is the translation of D284-AH5 (SEQ ID NO:306).

[0273] FIG. 159A is a set of nucleic acid sequence alignments consisting of the alignment of D58-BG7 (SEQ ID NO:10), D58-AB1 (SEQ ID NO:12), and D58-BE4 (SEQ ID NO:16); and the alignment of D56-AH7 (SEQ ID NO:18) and D13a-5 (SEQ ID NO:20). Percent identity between the sequences of each alignment are shown below the respective alignments.

[0274] FIG. 159B is a set of nucleic acid sequence alignments consisting of the alignment of D56-AG10 (SEQ ID NO:22), D35-33 (SEQ ID NO:24), and D34-62 (SEQ ID NO:26); and the alignment of D56-AA7 (SEQ ID NO:28), D56-AE1 (SEQ ID NO:30), and D185-BD3 (SEQ ID NO:152). Percent identity between the sequences of each alignment are shown below the respective alignments.

[0275] FIG. 159C is a set of nucleic acid sequence alignments consisting of the alignment of D56A-AB6 (SEQ ID NO:36), D35-BB7 (SEQ ID NO:32), D177-BA7 (SEQ ID NO:34), and D144-AE2 (SEQ ID NO:38); and the alignment of D56-AG11 (SEQ ID NO:40) and D179-AA1 (SEQ ID NO:42). Percent identity between the sequences of each alignment are shown below the respective alignments.

[0276] FIG. 159D is a set of nucleic acid sequence alignments consisting of the alignment of D56-AC7 (SEQ ID NO:44) and D144-AD1 (SEQ ID NO:46); and the alignment of D181-AB5 (SEQ ID NO:50) and D73-AC9 (SEQ ID NO:52). Percent identity between the sequences of each alignment are shown below the respective alignments.

[0277] FIG. 159E is the alignment of the nucleic acid sequences D58-AB9 (SEQ ID NO:56), D56-AG9 (SEQ ID NO:58), D35-BG11 (SEQ ID NO:62), D34-25 (SEQ ID NO:72), D35-BA3 (SEQ ID NO:66), D34-52 (SEQ ID NO:70), D56-AG6 (SEQ ID NO:60), D35-42 (SEQ ID NO:64), and D34-57 (SEQ ID NO:68). Percent identity between the sequences of the alignment is shown below the alignment.

[0278] FIG. 159F is a set of nucleic acid sequence alignments consisting of the alignment of D177-BD7 (SEQ ID NO:92) and D177-BD5 (SEQ ID NO:78); and the alignment of D56A-AG10 (SEQ ID NO:80), D58-AD12 (SEQ ID NO:84), and D58-BC5 (SEQ ID NO:82). Percent identity between the sequences of each alignment are shown below the respective alignments.

[0279] FIG. 159G is a set of nucleic acid sequence alignments consisting of the alignment of D56-AD6 (SEQ ID NO:96), D56-AC11 (SEQ ID NO:86), D35-39 (SEQ ID NO:88), and D58-BH4 (SEQ ID NO:90); and the alignment of D73A-AD6 (SEQ ID NO:98) and D70A-BA11 (SEQ ID NO:100). Percent identity between the sequences of each alignment are shown below the respective alignments.

[0280] FIG. 159H is a set of nucleic acid sequence alignments consisting of the alignment of D70A-AB5 (SEQ ID NO:104) and D70A-AA8 (SEQ ID NO:106); and the alignment of D70A-AB8 (SEQ ID NO:108), D70A-BH2 (SEQ ID NO:110), D70A-AA4 (SEQ ID NO:112). Percent identity between the sequences of each alignment are shown below the respective alignments.

[0281] FIG. 159I is a set of nucleic acid sequence alignments consisting of the alignment of D70A-BA1 (SEQ ID NO:114) and D70A-BA9 (SEQ ID NO:116):and the alignment of D144-AH1 (SEQ ID NO:122), D34-65 (SEQ ID NO:124), and D181-AC5 (SEQ ID NO:120). Percent identity between the sequences of each alignment are shown below the respective alignments.

[0282] FIG. 159J is a set of nucleic acid sequence alignments consisting of the alignment of D58-AA1 (SEQ ID NO:130), D185-BC1 (SEQ ID NO:142), and D185-BG2 (SEQ ID NO:144); and the alignment of D177-BF7 (SEQ ID NO:136), D185-BD2 (SEQ ID NO:148), and D185-BE1 (SEQ ID NO:146). Percent identity between the sequences of each alignment are shown below the respective alignments.

[0283] FIG. 159K is the alignment of nucleic acid sequences D70-AA12 (SEQ ID NO:140) and D176-BF2 (SEQ ID NO:94). Percent identity between the sequences of the alignment is shown below the alignment.

[0284] FIG. 160A is a set of amino acid sequence alignments consisting of the sequence alignment of D208-AD9 (SEQ ID NO:2196), D120-AH4 (SEQ ID NO:2197), D121-AA8 (SEQ ID NO:2198), D122-AF10 (SEQ ID NO:2199), D103-AH3 (SEQ ID NO:2200), D208-AC8 (SEQ ID NO:2201), and D235-AB1 (SEQ ID NO:2202); the sequence alignment of D244-AD4 (SEQ ID NO:2203), D244-AB6 (SEQ ID NO:2204), D285-AA8 (SEQ ID NO:2205), D285-AB9 (SEQ ID NO:2206), and D268-AE2 (SEQ ID NO:2207); and the sequence alignment of D100A-AC3 (SEQ ID NO:2208) and D100A-BE2 (SEQ ID NO:2209).

[0285] FIG. 160B is a set of amino acid sequence alignments consisting the sequence alignment of the sequence alignment of D205-BG9 (SEQ ID NO:2210), D205-BE9 (SEQ ID NO:2211), and D205-AH4 (SEQ ID NO:2212); the sequence alignment of D259-AB9 (SEQ ID NO:2213), D257-AE4 (SEQ ID NO:2214), and D147-AD3 (SEQ ID NO:2215); the sequence alignment of D249-AEB (SEQ ID NO:2216) and D248-AA6 (SEQ ID NO:2217); the sequence alignment of D233-AG7 (SEQ ID NO:2218), D224-BD11 (SEQ ID NO:2219), and D224-AF10 (SEQ ID NO:2220); and the sequence alignment of D105-AD6 (SEQ ID NO:2221), D215-AB5 (SEQ ID NO:2222), and D135-AE1 (SEQ ID NO:2223).

[0286] FIG. 160C is a set of amino acid sequence alignments consisting of the sequence alignment of D87A-AF3 (SEQ ID NO:2224) and D210-BD4 (SEQ ID NO:2225); the sequence alignment of D89-AB1 (SEQ ID NO:2226), D89-AD2 (SEQ ID NO:2227), D163-AG12 (SEQ ID NO:2228), D163-AG11 (SEQ ID NO:2229), and D163-AF12 (SEQ ID NO:2230); the sequence alignment of D267-AF10 (SEQ ID NO:2231), D96-AC2 (SEQ ID NO:2232), D96-AB6 (SEQ ID NO:2233), D207-AA5 (SEQ ID NO:2234), D207-AB4 (SEQ ID NO:2235), and D207-AC4 (SEQ ID NO:2236); and the sequence alignment of D98-AG1 (SEQ ID NO:2237) and D98-AA1 (SEQ ID NO:2238).

[0287] FIG. 160D is a set of amino acid sequence alignments consisting of the sequence alignment of D209-AA10 (SEQ ID NO:2239), D209-AA12 (SEQ ID NO:2240), D209-AH10 (SEQ ID NO:2241), D209-AH12 (SEQ ID NO:2242), and D90a-BB3 (SEQ ID NO:2243); the sequence alignment of D129-AD10 (SEQ ID NO:2244) and D104A-AE8 (SEQ ID NO:2245); the sequence alignment of D228-AH8 (SEQ ID NO:2246), D228-AD7 (SEQ ID NO:2247), D250-AC11 (SEQ ID NO:2248), and D247-AH1 (SEQ ID NO:2249); and the sequence alignment of D128-AB7 (SEQ ID NO:2250), D243-AA2 (SEQ ID NO:2251), and D125-AF11 (SEQ ID NO:2252).

[0288] FIG. 160E is an amino acid sequence alignment of D284-AH5 (SEQ ID NO:2253) and D110-AF12 (SEQ ID NO:2254).

[0289] FIG. 161 is a diagram showing the cloning of cytochrome p450 cDNA fragments by PCR. Primers used for the cloning are listed: DM (SEQ ID NO:2255), DM4 (SEQ ID NO:2256), DM12 (SEQ ID NO:2257), DM13 (SEQ ID NO:2258), DM17 (SEQ ID NO:2259), OLIGO d(T) (SEQ ID NO:2260), T7 (SEQ ID NO:2261), and SP6 (SEQ ID NO:2262).

[0290] FIG. 162 is the nucleic acid sequence of D425-AB10 (SEQ ID NO:367), and the amino acid sequence of D425-AB10 (SEQ ID NO:368), which is the translation of D425-AB10 (SEQ ID NO:367).

[0291] FIG. 163 is the nucleic acid sequence of D425-AB11 (SEQ ID NO:369), and the amino acid sequence of D425-AB11 (SEQ ID NO:370), which is the translation of D425-AB11 (SEQ ID NO:369).

[0292] FIG. 164 is the nucleic acid sequence of D425-AC9 (SEQ ID NO:371), and the amino acid sequence of D425-AC9 (SEQ ID NO:372), which is the translation of D425-AC9 (SEQ ID NO:371).

[0293] FIG. 165 is the nucleic acid sequence of D425-AC10 (SEQ ID NO:373), and the amino acid sequence of D425-AC10 (SEQ ID NO:374), which is the translation of D425-AC10 (SEQ ID NO:373).

[0294] FIG. 166 is the nucleic acid sequence of D425-AC11 (SEQ ID NO:375), and the amino acid sequence of D425-AC11 (SEQ ID NO:376), which is the translation of D425-AC11 (SEQ ID NO:375).

[0295] FIG. 167 is the nucleic acid sequence of D425-AG11 (SEQ ID NO:377), and the amino acid sequence of D425-AG11 (SEQ ID NO:378), which is the translation of D425-AG11 (SEQ ID NO:377).

[0296] FIG. 168 is the nucleic acid sequence of D425-AH7 (SEQ ID NO:379), and the amino acid sequence of D425-AH7 (SEQ ID NO:380), which is the translation of D425-AH7 (SEQ ID NO:379).

[0297] FIG. 169 is the nucleic acid sequence of D425-AH11 (SEQ ID NO:381), and the amino acid sequence of D425-AH11 (SEQ ID NO:382), which is the translation of D425-AH11 (SEQ ID NO:381).

[0298] FIG. 170 is the nucleic acid sequence of D427-AA5 (SEQ ID NO:383), and the amino acid sequence of D427-AA5 (SEQ ID NO:384), which is the translation of D427-AA5 (SEQ ID NO:383).

[0299] FIG. 171 is a table listing the probe set sequences (SEQ ID NO:385-SEQ ID NO:445) of clones on the GeneChip® microarray.

[0300] FIG. 172-1 is a group of nucleic acid and amino acid sequences consisting of the nucleic acid sequence of D424-AA4 (SEQ ID NO:446); the nucleic acid sequence of D424-AF5 (SEQ ID NO:447) and the amino acid sequence of D424-AF5 (SEQ ID NO:448), which is the translation of D424-AF5 (SEQ ID NO:447); the nucleic acid sequence of D425-AA11 (SEQ ID NO:449) and the amino acid sequence of D425-AA11 (SEQ ID NO:450), which is the translation of D425-AA11 (SEQ ID NO:449); and the nucleic acid sequence of D425-AF11 (SEQ ID NO:451).

[0301] FIG. 172-2 is a group of nucleic acid and amino acid sequences consisting of the amino acid sequence of D425-AF11 (SEQ ID NO:452), which is the translation of D425-AF11 (SEQ ID NO:451); the nucleic acid sequence of D425-AH10 (SEQ ID NO:453) and the amino acid sequence of D425-AH10 (SEQ ID NO:454), which is the translation of D425-AH10 (SEQ ID NO:453); the nucleic acid sequence of D426-AA3 (SEQ ID NO:455) and the amino acid sequence of D426-AA3 (SEQ ID NO:456), which is the translation of D426-AA3 (SEQ ID NO:455); and the nucleic acid sequence of D426-AG1 (SEQ ID NO:457) and the amino acid sequence of D426-AG1 (SEQ ID NO:458), which is the translation of D426-AG1 (SEQ ID NO:457).

[0302] FIG. 172-3 is a group of nucleic acid and amino acid sequences consisting of the nucleic acid sequence of D427-AA6 (SEQ ID NO:459) and the amino acid sequence of D427-AA6 (SEQ ID NO:460), which is the translation of D427-AA6 (SEQ ID NO:459); the nucleic acid sequence of D427-AB6 (SEQ ID NO:461) and the amino acid sequence of D427-AB6 (SEQ ID NO:462), which is the translation of D427-AB6 (SEQ ID NO:461); the nucleic acid sequence of D428-AC9 (SEQ ID NO:463) and the amino acid sequence of D428-AC9 (SEQ ID NO:464), which is the translation of D428-AC9 (SEQ ID NO:463); and the nucleic acid sequence of D428-AH10 (SEQ ID NO:465).

[0303] FIG. 172-4 is a group of nucleic acid and amino acid sequences consisting of the amino acid sequence of D428-AH10 (SEQ ID NO:466), which is the translation of D428-AH10 (SEQ ID NO:465); the nucleic acid sequence of D429-AA1 (SEQ ID NO:467) and the amino acid sequence of D429-AA1 (SEQ ID NO:468), which is the translation of D429-AA1 (SEQ ID NO:467); the nucleic acid sequence of D430-AA3 (SEQ ID NO:469) and the amino acid sequence of D430-AA3 (SEQ ID NO:470), which is the translation of D430-AA3 (SEQ ID NO:469); and the nucleic acid sequence of D431-AE6 (SEQ ID NO:471) and the amino acid sequence of D43 1-AE6 (SEQ ID NO:472), which is the translation of D43 1-AE6 (SEQ ID NO:471).

[0304] FIG. 172-5 is a group of nucleic acid and amino acid sequences consisting of the nucleic acid sequence of D113-AE9 (SEQ ID NO:473) and the amino acid sequence of D113-AE9 (SEQ ID NO:474), which is the translation of D113-AE9 (SEQ ID NO:473); and the nucleic acid sequence of D114-AE12 (SEQ ID NO:475).

[0305] FIG. 172-6 is a group of nucleic acid and amino acid sequences consisting of the amino acid sequence of D114-AE12 (SEQ ID NO:476), which is the translation of D114-AE12 (SEQ ID NO:475); the nucleic acid sequence of D119-AC3 (SEQ ID NO:477) and the amino acid sequence of D119-AC3 (SEQ ID NO:478), which is the translation of D119-AC3 (SEQ ID NO:477); and the nucleic acid sequence of D132-AA5 (SEQ ID NO:479).

[0306] FIG. 172-7 is a group of nucleic acid and amino acid sequences consisting of the amino acid sequence of D132-AA5 (SEQ ID NO:480), which is the translation of D132-AA5 (SEQ ID NO:479); the nucleic acid sequence of D223-BB10 (SEQ ID NO:481) and the amino acid sequence of D223-BB10 (SEQ ID NO:482), which is the translation of D223-BB10 (SEQ ID NO:481); and the nucleic acid sequence of D245-AA8 (SEQ ID NO:483) and the amino acid sequence of D245-AA8 (SEQ ID NO:484), which is the translation of D245-AA8 (SEQ ID NO:483).

[0307] FIG. 172-8 is a group of nucleic acid and amino acid sequences consisting of the nucleic acid sequence of D246-AE12 (SEQ ID NO:485) and the amino acid sequence of D246-AE12 (SEQ ID NO:486), which is the translation of D246-AE12 (SEQ ID NO:485); and the nucleic acid sequence of D279-AD1 (SEQ ID NO:487) and the amino acid sequence of D279-AD1 (SEQ ID NO:488), which is the translation of D279-AD1 (SEQ ID NO:487).

[0308] FIG. 172-9 is a group of nucleic acid and amino acid sequences consisting of the nucleic acid sequence of D282-AA10 (SEQ ID NO:489) and the amino acid sequence of D282-AA10 (SEQ ID NO:490), which is the translation of D282-AA10 (SEQ ID NO:489); and the nucleic acid sequence of D295-AA1 (SEQ ID NO:491).

[0309] FIG. 172-10 is a group of nucleic acid and amino acid sequences consisting of the amino acid sequence of D295-AA1 (SEQ ID NO:492), which is the translation of D295-AA1 (SEQ ID NO:491); the nucleic acid sequence of D101A-AE2 (SEQ ID NO:493) and the amino acid sequence of D101A-AE2 (SEQ ID NO:494), which is the translation of D101A-AE2 (SEQ ID NO:493); and the nucleic acid sequence of D108-AA4 (SEQ ID NO:495).

[0310] FIG. 172-11 is a group of nucleic acid and amino acid sequences consisting of the amino acid sequence of D108-AA4 (SEQ ID NO:496), which is the translation of D108-AA4 (SEQ ID NO:495); the nucleic acid sequence of D124-AC5(5′) (SEQ ID NO:497) and the amino acid sequence of D124-AC5(5′) (SEQ ID NO:498), which is the translation of D124-AC5(5′) (SEQ ID NO:497); the nucleic acid sequence of D124-AC5(3′) (SEQ ID NO:499) and the amino acid sequence of D124-AC5(3′) (SEQ ID NO:500), which is the translation of D124-AC5(3′) (SEQ ID NO:499); and the nucleic acid sequence of D141-AD7 (SEQ ID NO:501).

[0311] FIG. 172-12 is a group of nucleic acid and amino acid sequences consisting of the amino acid sequence of D141-AD7 (SEQ ID NO:502), which is the translation of D141-AD7 (SEQ ID NO:501); and the nucleic acid sequence of D148-AD1 (SEQ ID NO:503) and the amino acid sequence of D148-AD1 (SEQ ID NO:504), which is the translation of D148-AD1 (SEQ ID NO:503).

[0312] FIG. 172-13 is a group of nucleic acid and amino acid sequences consisting of the nucleic acid sequence of D212-BC11 (SEQ ID NO:505) and the amino acid sequence of D212-BC11 (SEQ ID NO:506), which is the translation of D212-BC11 (SEQ ID NO:505); and the nucleic acid sequence of D217-AB10 (SEQ ID NO:507) and the amino acid sequence of D217-AB10 (SEQ ID NO:508), which is the translation of D217-AB10 (SEQ ID NO:507).

[0313] FIG. 172-14 is a group of nucleic acid and amino acid sequences consisting of the nucleic acid sequence of D220-BC6 (SEQ ID NO:509) and the amino acid sequence of D220-BC6 (SEQ ID NO:510), which is the translation of D220-BC6 (SEQ ID NO:509); the nucleic acid sequence of D225-AG9 (SEQ ID NO:511) and the amino acid sequence of D225-AG9 (SEQ ID NO:512), which is the translation of D225-AG9 (SEQ ID NO:511); the nucleic acid sequence of D231-AF1 (SEQ ID NO:513) and the amino acid sequence of D231-AF1 (SEQ ID NO:514), which is the translation of D231-AF1 (SEQ ID NO:513); and the nucleic acid sequence of D232-AH5 (SEQ ID NO:515).

[0314] FIG. 172-15 is a group of nucleic acid and amino acid sequences consisting of the amino acid sequence of D232-AH5 (SEQ ID NO:516), which is the translation of D232-AH5 (SEQ ID NO:515); the nucleic acid sequence of D240-BB8 (SEQ ID NO:517) and the amino acid sequence of D240-BB8 (SEQ ID NO:518), which is the translation of D240-BB8 (SEQ ID NO:517); the nucleic acid sequence of D280-AA6 (SEQ ID NO:519) and the amino acid sequence of D280-AA6 (SEQ ID NO:520), which is the translation of D280-AA6 (SEQ ID NO:519); and the nucleic acid sequence of D285-AD7 (SEQ ID NO:521) and the amino acid sequence of D285-AD7 (SEQ ID NO:522), which is the translation of D285-AD7 (SEQ ID NO:521).

[0315] FIG. 172-16 is a group of nucleic acid and amino acid sequences consisting of the nucleic acid sequence of D285-AH9 (SEQ ID NO:523) and the amino acid sequence of D285-AH9 (SEQ ID NO:524), which is the translation of D285-AH9 (SEQ ID NO:523); the nucleic acid sequence of D99-AB3 (SEQ ID NO:525) and the amino acid sequence of D99-AB3 (SEQ ID NO:526), which is the translation of D99-AB3 (SEQ ID NO:525); and the nucleic acid sequence of D99-AC2 (SEQ ID NO:527) and the amino acid sequence of D99-AC2 (SEQ ID NO:528), which is the translation of D99-AC2 (SEQ ID NO:527).

[0316] FIG. 172-17 is a group of nucleic acid and amino acid sequences consisting of the nucleic acid sequence of D99-AF11 (SEQ ID NO:529) and the amino acid sequence of D99-AF11 (SEQ ID NO:530), which is the translation of D99-AF11 (SEQ ID NO:529); the nucleic acid sequence of D99-AH4 (SEQ ID NO:531) and the amino acid sequence of D99-AH4 (SEQ ID NO:532), which is the translation of D99-AH4 (SEQ ID NO:531); the nucleic acid sequence of D99-AH7 (SEQ ID NO:533) and the amino acid sequence of D99-AH7 (SEQ ID NO:534), which is the translation of D99-AH7 (SEQ ID NO:533); the nucleic acid sequence of D99-DB4 (SEQ ID NO:535) and the amino acid sequence of D99-DB4 (SEQ ID NO:536), which is the translation of D99-DB4 (SEQ ID NO:535).

[0317] FIG. 172-18 is a group of nucleic acid and amino acid sequences consisting of the nucleic acid sequence of D99-DG4 (SEQ ID NO:537) and the amino acid sequence of D99-DG4 (SEQ ID NO:538), which is the translation of D99-DG4 (SEQ ID NO:537); the nucleic acid sequence of D40-2 (SEQ ID NO:539) and the amino acid sequence of D40-2 (SEQ ID NO:540), which is the translation of D40-2 (SEQ ID NO:539); the nucleic acid sequence of D301-EE11 (SEQ ID NO:541) and the amino acid sequence of D301-EE11 (SEQ ID NO:542), which is the translation of D301-EE11 (SEQ ID NO:541); and the nucleic acid sequence of D302-AE10 (SEQ ID NO:543).

[0318] FIG. 172-19 is a group of nucleic acid and amino acid sequences consisting of the amino acid sequence of D302-AE10 (SEQ ID NO:544), which is the translation of D302-AE10 (SEQ ID NO:543); the nucleic acid sequence of D303-AC6 (SEQ ID NO:545) and the amino acid sequence of D303-AC6 (SEQ ID NO:546), which is the translation of D303-AC6 (SEQ ID NO:545); and the nucleic acid sequence of D303-AC11 (SEQ ID NO:547) and the amino acid sequence of D303-AC11 (SEQ ID NO:548), which is the translation of D303-AC11 (SEQ ID NO:547).

[0319] FIG. 173-1 is the nucleic acid sequence of 40-17 (SEQ ID NO:549), 40-20 (SEQ ID NO:550), 40-23 (SEQ ID NO:551), 40-26 (SEQ ID NO:552), D40-27 (SEQ ID NO:553), 40-28 (SEQ ID NO:554), and 40-78 (SEQ ID NO:555).

[0320] FIG. 173-2 is the nucleic acid sequence of 40-83 (SEQ ID NO:556), D40-86 (SEQ ID NO:557), D40-97 (SEQ ID NO:558), 40-100 (SEQ ID NO:559), 40-107 (SEQ ID NO:560), D41-41 (SEQ ID NO:561), and D41-60 (SEQ ID NO:562).

[0321] FIG. 173-3 is the nucleic acid sequence of D41-65 (SEQ ID NO:563), D41-67 (SEQ ID NO:564), D41-69 (SEQ ID NO:565), D41-99 (SEQ ID NO:566), D42-AA3 (SEQ ID NO:567), D42-AA7 (SEQ ID NO:568), and D42-AC3 (SEQ ID NO:569).

[0322] FIG. 173-4 is the nucleic acid sequence of D42-AC7 (SEQ ID NO:570), D42-AC8 (SEQ ID NO:571), D42-AD3 (SEQ ID NO:572), D42-AD12 (SEQ ID NO:573), D42-AF3 (SEQ ID NO:574), and D42-AH3 (SEQ ID NO:575).

[0323] FIG. 173-5 is the nucleic acid sequence of D42-BA2 (SEQ ID NO:576), D42-BB11 (SEQ ID NO:577), D42-KC9 (SEQ ID NO:578), D42-KC10 (SEQ ID NO:579), D42-LB2 (SEQ ID NO:580), D42-LC7 (SEQ ID NO:581), D42-TG7 (SEQ ID NO:582), and D42-UG8 (SEQ ID NO:583).

[0324] FIG. 173-6 is the nucleic acid sequence of D42-ZB1 (SEQ ID NO:584), D300-AA7 (SEQ ID NO:585), D300-AB3 (SEQ ID NO:586), D300-AB7 (SEQ ID NO:587), D300-AB10 (SEQ ID NO:588), D300-AB11 (SEQ ID NO:589), and D300-AC2 (SEQ ID NO:590).

[0325] FIG. 173-7 is the nucleic acid sequence of D300-AC6 (SEQ ID NO:591), D300-AC7 (SEQ ID NO:592), D300-AD4 (SEQ ID NO:593), D300-AD6 (SEQ ID NO:594), D300-AD10 (SEQ ID NO:595), D300-AE3 (SEQ ID NO:596), and D300-AE9 (SEQ ID NO:597).

[0326] FIG. 173-8 is the nucleic acid sequence of D300-AE11 (SEQ ID NO:598), D300-AF4 (SEQ ID NO:599), D300-AF5 (SEQ ID NO:600), D300-AF7 (SEQ ID NO:601), D300-AF8 (SEQ ID NO:602), D300-AF9 (SEQ ID NO:603), and D300-AF11 (SEQ ID NO:604).

[0327] FIG. 173-9 is the nucleic acid sequence of D300-AG1 (SEQ ID NO:605), D300-AG2 (SEQ ID NO:606), D300-AG3 (SEQ ID NO:607), D300-AG10 (SEQ ID NO:608), D300-AH6 (SEQ ID NO:609), D300-AH9 (SEQ ID NO:610), D300-AH10 (SEQ ID NO:611), and D300-AH11 (SEQ ID NO:612).

[0328] FIG. 173-10 is the nucleic acid sequence of D300-BA5 (SEQ ID NO:613), D300-BA6 (SEQ ID NO:614), D300-BA7 (SEQ ID NO:615), D300-BA12 (SEQ ID NO:616), D300-BB6 (SEQ ID NO:617), D300-BB7 (SEQ ID NO:618), and D300-BC1 (SEQ ID NO:619).

[0329] FIG. 173-11 is the nucleic acid sequence of D300-BC4 (SEQ ID NO:620), D300-BC7 (SEQ ID NO:621), D300-BC8 (SEQ ID NO:622), D300-BC9 (SEQ ID NO:623), D300-BD2 (SEQ ID NO:624), D300-BD7 (SEQ ID NO:625), and D300-BE1 (SEQ ID NO:626).

[0330] FIG. 173-12 is the nucleic acid sequence of D300-BE2 (SEQ ID NO:627), D300-BE7 (SEQ ID NO:628), D300-BE8 (SEQ ID NO:629), D300-BE9 (SEQ ID NO:630), D300-BE12 (SEQ ID NO:631), D300-BF7 (SEQ ID NO:632), D300-BF11 (SEQ ID NO:633), and D300-BG1 (SEQ ID NO:634).

[0331] FIG. 173-13 is the nucleic acid sequence of D300-BG2 (SEQ ID NO:635), D300-BG5 (SEQ ID NO:636), D300-BH6 (SEQ ID NO:637), D300-BH9 (SEQ ID NO:638), D300-CA1 (SEQ ID NO:639), D300-CA6 (SEQ ID NO:640), and D300-CB1 (SEQ ID NO:641).

[0332] FIG. 173-14 is the nucleic acid sequence of D300-CB12 (SEQ ID NO:642), D300-CC2 (SEQ ID NO:643), D300-CD2 (SEQ ID NO:644), D300-CD3 (SEQ ID NO:645), D300-CD4 (SEQ ID NO:646), D300-CD5 (SEQ ID NO:647), and D300-CE3 (SEQ ID NO:648).

[0333] FIG. 173-15 is the nucleic acid sequence of D300-CE7 (SEQ ID NO:649), D300-CF1 (SEQ ID NO:650), D300-CF2 (SEQ ID NO:65 ), D300-CF11 (SEQ ID NO:652), D300-CG2 (SEQ ID NO:653), D300-CG7 (SEQ ID NO:654), D300-CH1 (SEQ ID NO:655), and D300-CH3 (SEQ ID NO:656).

[0334] FIG. 173-16 is the nucleic acid sequence of D300-CH5 (SEQ ID NO:657), D300-CH7 (SEQ ID NO:658), D300-DA1 (SEQ ID NO:659), D300-DA4 (SEQ ID NO:660), D300-DB2 (SEQ ID NO:661), D300-DB4 (SEQ ID NO:662), D300-DB6 (SEQ ID NO:663), and D300-DB7-c (SEQ ID NO:664).

[0335] FIG. 173-17 is the nucleic acid sequence of D300-DB8 (SEQ ID NO:665), D300-DC2 (SEQ ID NO:666), D300-DC4 (SEQ ID NO:667), D300-DC7 (SEQ ID NO:668), D300-DC10 (SEQ ID NO:669), D300-DC11 (SEQ ID NO:670), and D300-DD5 (SEQ ID NO:671).

[0336] FIG. 173-18 is the nucleic acid sequence of D300-DD6 (SEQ ID NO:672), D300-DE2 (SEQ ID NO:673), D300-DE9 (SEQ ID NO:674), D300-DE10 (SEQ ID NO:675), D300-DF5 (SEQ ID NO:676), D300-DF6 (SEQ ID NO:677), D300-DF8 (SEQ ID NO:678), and D300-DF12 (SEQ ID NO:679).

[0337] FIG. 173-19 is the nucleic acid sequence of D300-DG1 (SEQ ID NO:680), D300-DG3 (SEQ ID NO:681), D300-DG9 (SEQ ID NO:682), D300-DG11 (SEQ ID NO:683), D300-DH10 (SEQ ID NO:684), D301-AB10 (SEQ ID NO:685), and D301-AC5 (SEQ ID NO:686).

[0338] FIG. 173-20 is the nucleic acid sequence of D301-AC7 (SEQ ID NO:687), D301-AC9 (SEQ ID NO:688), D301-AD1 (SEQ ID NO:689), D301-AD2 (SEQ ID NO:690), D301-AE4c (SEQ ID NO:691), D301-AF12 (SEQ ID NO:692), D301-AH6 (SEQ ID NO:693), and D301-AH12 (SEQ ID NO:694).

[0339] FIG. 173-21 is the nucleic acid sequence of D301-BB8 (SEQ ID NO:695), D301-BB9 (SEQ ID NO:696), D301-BC1 (SEQ ID NO:697), D301-BC8 (SEQ ID NO:698), D301-BD1 (SEQ ID NO:699), D301-BD2 (SEQ ID NO:700), and D301-BF3 (SEQ ID NO:701).

[0340] FIG. 173-22 is the nucleic acid sequence of D301-DA4 (SEQ ID NO:702), D301-DA8 (SEQ ID NO:703), D301-DB5 (SEQ ID NO:704), D301-DC6 (SEQ ID NO:705), D301-DD4 (SEQ ID NO:706), D301-DG1 (SEQ ID NO:707), D301-DG4c (SEQ ID NO:708), and D301-EA5 (SEQ ID NO:709).

[0341] FIG. 173-23 is the nucleic acid sequence of D301-EA6 (SEQ ID NO:710), D301-EA7 (SEQ ID NO:711), D301-EC9 (SEQ ID NO:712), D301-EC10 (SEQ ID NO:713), D301-ED5 (SEQ ID NO:714), D301-ED7 (SEQ ID NO:715), and D301-EE7 (SEQ ID NO:716).

[0342] FIG. 173-24 is the nucleic acid sequence of D301-EF2 (SEQ ID NO:717), D301-EF5 (SEQ ID NO:718), D301-EF10 (SEQ ID NO:719), D301-EG12 (SEQ ID NO:720), D302-AB8 (SEQ ID NO:721), D302-AB9 (SEQ ID NO:722), D302-AB12 (SEQ ID NO:723), and D302-AC1 (SEQ ID NO:724).

[0343] FIG. 173-25 is the nucleic acid sequence of D302-AC5 (SEQ ID NO:725), D302-AC6 (SEQ ID NO:726), D302-AC7 (SEQ ID NO:727), D302-AC12 (SEQ ID NO:728), D302-AD4 (SEQ ID NO:729), D302-AD7 (SEQ ID NO:730), and D302-AE7 (SEQ ID NO:731).

[0344] FIG. 173-26 is the nucleic acid sequence of D302-AF6 (SEQ ID NO:732), D302-AF8 (SEQ ID NO:733), D302-AG2 (SEQ ID NO:734), D302-AH10 (SEQ ID NO:735), D302-BA2 (SEQ ID NO:736), D302-BA6 (SEQ ID NO:737), D302-BC3 (SEQ ID NO:738), and D302-BC6 (SEQ ID NO:739).

[0345] FIG. 173-27 is the nucleic acid sequence of D302-BC9 (SEQ ID NO:740), D302-BD3 (SEQ ID NO:741), D302-BD7 (SEQ ID NO:742), D302-BD9 (SEQ ID NO:743), D302-BE1 (SEQ ID NO:744), and D302-BE2 (SEQ ID NO:745).

[0346] FIG. 173-28 is the nucleic acid sequence of D302-BE6 (SEQ ID NO:746), D302-BE7 (SEQ ID NO:747), D302-BF1 (SEQ ID NO:748), D302-BF5 (SEQ ID NO:749), D302-BG1 (SEQ ID NO:750), D302-bg3 (SEQ ID NO:751), and D302-BG7 (SEQ ID NO:752).

[0347] FIG. 173-29 is the nucleic acid sequence of D302-Bg9 (SEQ ID NO:753), D302-BH1 (SEQ ID NO:754), D302-bh9 (SEQ ID NO:755), D302-CA5 (SEQ ID NO:756), D302-CB7 (SEQ ID NO:757), D302-CC1 (SEQ ID NO:758), D302-CC3 (SEQ ID NO:759), and D302-CD2 (SEQ ID NO:760).

[0348] FIG. 173-30 is the nucleic acid sequence of D302-CE3 (SEQ ID NO:761), D302-CE9 (SEQ ID NO:762), D302-CF2 (SEQ ID NO:763), D302-CF5 (SEQ ID NO:764), D302-CF6 (SEQ ID NO:765), D302-CH1 (SEQ ID NO:766), and D302-CH4 (SEQ ID NO:767).

[0349] FIG. 173-31 is the nucleic acid sequence of D302-CH5 (SEQ ID NO:768), D302-CH6 (SEQ ID NO:769), D302-DA2 (SEQ ID NO:770), D302-DA5 (SEQ ID NO:771), D302-DA9 (SEQ ID NO:772), D302-DC4 (SEQ ID NO:773), and D302-DC7 (SEQ ID NO:774).

[0350] FIG. 173-32 is the nucleic acid sequence of D302-DC8 (SEQ ID NO:775), D302-DC11 (SEQ ID NO:776), D302-DD3 (SEQ ID NO:777), D302-DF5 (SEQ ID NO:778), D302-DF7 (SEQ ID NO:779), D302-DG9 (SEQ ID NO:780), and D302-DH8 (SEQ ID NO:781).

[0351] FIG. 173-33 is the nucleic acid sequence of D303-AA9 (SEQ ID NO:782), D303-AA10 (SEQ ID NO:783), D303-AB11 (SEQ ID NO:784), D303-AC4 (SEQ ID NO:785), D303-AD3 (SEQ ID NO:786), D303-AD11 (SEQ ID NO:787), D303-AE1 (SEQ ID NO:788), and D303-ae2 (SEQ ID NO:789).

[0352] FIG. 173-34 is the nucleic acid sequence of D303-ae6 (SEQ ID NO:790), D303-AF5 (SEQ ID NO:791), D303-AF12 (SEQ ID NO:792), D303-AG1 (SEQ ID NO:793), D303-AG8 (SEQ ID NO:794), D303-AG9 (SEQ ID NO:795), D303-AH5 (SEQ ID NO:796), and D303-BA1 (SEQ ID NO:797).

[0353] FIG. 173-35 is the nucleic acid sequence of D303-BA5 (SEQ ID NO:798), D303-BB6 (SEQ ID NO:799), D303-BC1 (SEQ ID NO:800), D303-BC2 (SEQ ID NO:801), D303-BC8 (SEQ ID NO:802), D303-BC11 (SEQ ID NO:803), D303-bd2 (SEQ ID NO:804), and D303-BD6 (SEQ ID NO:805).

[0354] FIG. 173-36 is the nucleic acid sequence of D303-BD9 (SEQ ID NO:806), D303-BE3 (SEQ ID NO:807), D303-BE4 (SEQ ID NO:808), D303-BE7 (SEQ ID NO:809), D303-BF1 (SEQ ID NO:810), D303-BF6 (SEQ ID NO:811), D303-BG2 (SEQ ID NO:812), and D303-BG11 (SEQ ID NO:813).

[0355] FIG. 173-37 is the nucleic acid sequence of D303-BH1 (SEQ ID NO:814), D303-BH6 (SEQ ID NO:815), D414-AG2 (SEQ ID NO:816), D35-33 (SEQ ID NO:817), D35-34 (SEQ ID NO:818), and D35-35 (SEQ ID NO:819).

[0356] FIG. 173-38 is the nucleic acid sequence of D35-41 (SEQ ID NO:820), D35-43 (SEQ ID NO:821), D35-51 (SEQ ID NO:822), and D35-AC4 (SEQ ID NO:823).

[0357] FIG. 173-39 is the nucleic acid sequence of D35-AC12 (SEQ ID NO:824), D35-AE2 (SEQ ID NO:825), D35-AE6 (SEQ ID NO:826), D35-AF1 (SEQ ID NO:827), D35-AF3 (SEQ ID NO:828), and D35-AG3 (SEQ ID NO:829).

[0358] FIG. 173-40 is the nucleic acid sequence of D35-BA5 (SEQ ID NO:830), D35-BA12 (SEQ ID NO:831), D35-BB1 (SEQ ID NO:832), D35-BB3 (SEQ ID NO:833), and D35-BB10 (SEQ ID NO:834).

[0359] FIG. 173-41 is the nucleic acid sequence of D35-BB12 (SEQ ID NO:835), D55-AA8 (SEQ ID NO:836), D55-AB1 (SEQ ID NO:837), D55-AB5 (SEQ ID NO:838), and D55-AB6 (SEQ ID NO:839).

[0360] FIG. 173-42 is the nucleic acid sequence of D55-AB7 (SEQ ID NO:840), D55-AB10 (SEQ ID NO:841), D55-AA2 (SEQ ID NO:842), D55-AC2 (SEQ ID NO:843), and D55-AC5 (SEQ ID NO:844).

[0361] FIG. 173-43 is the nucleic acid sequence of D55-AC7 (SEQ ID NO:845), D55-BA7 (SEQ ID NO:846), D55-BA8 (SEQ ID NO:847), D55-BA10 (SEQ ID NO:848), D55-BA11 (SEQ ID NO:849), and D55-BB9 (SEQ ID NO:850).

[0362] FIG. 173-44 is the nucleic acid sequence of D55-BB10 (SEQ ID NO:851), D55-BB12 (SEQ ID NO:852), D55-BC4 (SEQ ID NO:853), D55-BC5 (SEQ ID NO:854), D55-AA6 (SEQ ID NO:855), and D56-AE5 (SEQ ID NO:856).

[0363] FIG. 173-45 is the nucleic acid sequence of D56-AA2 (SEQ ID NO:857), D56-AA4 (SEQ ID NO:858), D56-AA8 (SEQ ID NO:859), D56-AA9 (SEQ ID NO:860), D56-AB1 (SEQ ID NO:861), and D56-AB7 (SEQ ID NO:862).

[0364] FIG. 173-46 is the nucleic acid sequence of D56-AB9 (SEQ ID NO:863), D56-AC9 (SEQ ID NO:864), D56-AD3 (SEQ ID NO:865), D56-AG8 (SEQ ID NO:866), and D56-AH1 (SEQ ID NO:867).

[0365] FIG. 173-47 is the nucleic acid sequence of D56-AH10 (SEQ ID NO:868), D56-AE2 (SEQ ID NO:869), D57-AB2 (SEQ ID NO:870), D57-AB5 (SEQ ID NO:871), and D57-AB6 (SEQ ID NO:872).

[0366] FIG. 173-48 is the nucleic acid sequence of D57-AB8 (SEQ ID NO:873), D57-AB11 (SEQ ID NO:874), D57-AB12 (SEQ ID NO:875), D57-AC1 (SEQ ID NO:876), D57-AC4 (SEQ ID NO:877), and D57-AC12 (SEQ ID NO:878).

[0367] FIG. 173-49 is the nucleic acid sequence of D57-AD5 (SEQ ID NO:879), D57-AD8 (SEQ ID NO:880), D57-AD9 (SEQ ID NO:881), D57-AE1 (SEQ ID NO:882), D57-AE2 (SEQ ID NO:883), and D57-AE7 (SEQ ID NO:884).

[0368] FIG. 173-50 is the nucleic acid sequence of D57-AF2 (SEQ ID NO:885), D57-AE12 (SEQ ID NO:886), D57-AF3 (SEQ ID NO:887), D57-AF5 (SEQ ID NO:888), and D57-AF9 (SEQ ID NO:889).

[0369] FIG. 173-51 is the nucleic acid sequence of D57-AG5 (SEQ ID NO:890), D57-AG7 (SEQ ID NO:891), D57-AG11 (SEQ ID NO:892), and D57-AH10 (SEQ ID NO:893).

[0370] FIG. 173-52 is the nucleic acid sequence of D58-AA3 (SEQ ID NO:894), D58-AA5 (SEQ ID NO:895), D58-AB3 (SEQ ID NO:896), D58-AB5 (SEQ ID NO:897), and D58-AC1 (SEQ ID NO:898).

[0371] FIG. 173-53 is the nucleic acid sequence of D58-AC9 (SEQ ID NO:899), D58-AC11 (SEQ ID NO:900), D58-AD2 (SEQ ID NO:901), and D58-AD5 (SEQ ID NO:902).

[0372] FIG. 173-54 is the nucleic acid sequence of D58-AD7 (SEQ ID NO:903), D58-AD8 (SEQ ID NO:904), D58-AD10 (SEQ ID NO:905), D58-AE1 (SEQ ID NO:906), and D58-AE2 (SEQ ID NO:907).

[0373] FIG. 173-55 is the nucleic acid sequence of D58-AE5 (SEQ ID NO:908), D58-AE9 (SEQ ID NO:909), D58-AE10 (SEQ ID NO:910), D58-AE11 (SEQ ID NO:911), and D58-AF3 (SEQ ID NO:912).

[0374] FIG. 173-56 is the nucleic acid sequence of D58-AF6 (SEQ ID NO:913), D58-AH4 (SEQ ID NO:914), D58-AH7 (SEQ ID NO:915), D58-AH9 (SEQ ID NO:916), and D58-AH10 (SEQ ID NO:917).

[0375] FIG. 173-57 is the nucleic acid sequence of D58-BA5 (SEQ ID NO:918), D58-BA7 (SEQ ID NO:919), D58-BB7 (SEQ ID NO:920), D58-BC5 (SEQ ID NO:921), D58-BD3 (SEQ ID NO:922), and D58-BD7 (SEQ ID NO:923).

[0376] FIG. 173-58 is the nucleic acid sequence of D58-BD8 (SEQ ID NO:924), D58-BD10 (SEQ ID NO:925), D58-BE2 (SEQ ID NO:926), D58-BE11 (SEQ ID NO:927), and D58-BF1 (SEQ ID NO:928).

[0377] FIG. 173-59 is the nucleic acid sequence of D58-BF2 (SEQ ID NO:929), D58-BG3 (SEQ ID NO:930), D58-BG5 (SEQ ID NO:931), D58-BG8 (SEQ ID NO:932), D58-BG10 (SEQ ID NO:933), and D58-BG12 (SEQ ID NO:934).

[0378] FIG. 173-60 is the nucleic acid sequence of D58-BH10 (SEQ ID NO:935), D58-BH8 (SEQ ID NO:936), D58-BH2 (SEQ ID NO:937), D60-AA1 (SEQ ID NO:938), D60-AA2 (SEQ ID NO:939), and D60-AA3 (SEQ ID NO:940).

[0379] FIG. 173-61 is the nucleic acid sequence of D60-AA5 (SEQ ID NO:941), D60-AA6 (SEQ ID NO:942), D60-AA7 (SEQ ID NO:943), D60-AA8 (SEQ ID NO:944), D60-AA10 (SEQ ID NO:945), and D60-AA11 (SEQ ID NO:946).

[0380] FIG. 173-62 is the nucleic acid sequence of D60-AA12 (SEQ ID NO:947), D60-AB3 (SEQ ID NO:948), D60-AB5 (SEQ ID NO:949), D60-AB6 (SEQ ID NO:950), D60-AB7 (SEQ ID NO:951), and D60-AB8 (SEQ ID NO:952).

[0381] FIG. 173-63 is the nucleic acid sequence of D60-AB11 (SEQ ID NO:953), D60-AC3 (SEQ ID NO:954), D60-AC5 (SEQ ID NO:955), D60-AC7 (SEQ ID NO:956), D60-AC8 (SEQ ID NO:957), and D60-AC11 (SEQ ID NO:958).

[0382] FIG. 173-64 is the nucleic acid sequence of D60-AC12 (SEQ ID NO:959), D60-AD3 (SEQ ID NO:960), D60-AD4 (SEQ ID NO:961), D60-AD5 (SEQ ID NO:962), D60-AD7 (SEQ ID NO:963), and D60-AE1 (SEQ ID NO:964).

[0383] FIG. 173-65 is the nucleic acid sequence of D60-AE4 (SEQ ID NO:965), D60-AE6 (SEQ ID NO:966), D60-AE8 (SEQ ID NO:967), D60-AE12 (SEQ ID NO:968), D60-AF5 (SEQ ID NO:969), and D60-AF8 (SEQ ID NO:970).

[0384] FIG. 173-66 is the nucleic acid sequence of D60-AF11 (SEQ ID NO:971), D60-AG1 (SEQ ID NO:972), D60-AG10 (SEQ ID NO:973), D60-AG12 (SEQ ID NO:974), D60-AH1 (SEQ ID NO:975), and D60-AH5 (SEQ ID NO:976).

[0385] FIG. 173-67 is the nucleic acid sequence of D60-AH6 (SEQ ID NO:977), D60-AH9 (SEQ ID NO:978), D60-AH10 (SEQ ID NO:979), D60-AH11 (SEQ ID NO:980), and D63-AA12 (SEQ ID NO:981).

[0386] FIG. 173-68 is the nucleic acid sequence of D64-4 (SEQ ID NO:982), D64-AB4 (SEQ ID NO:983), D64-AB10 (SEQ ID NO:984), D65-AA6 (SEQ ID NO:985), and D65-AA7 (SEQ ID NO:986).

[0387] FIG. 173-69 is the nucleic acid sequence of D65-AA9 (SEQ ID NO:987), D65-AB4 (SEQ ID NO:988), D65-AB5 (SEQ ID NO:989), D65-AB8 (SEQ ID NO:990), D65-AB9 (SEQ ID NO:991), and D65-AB11 (SEQ ID NO:992).

[0388] FIG. 173-70 is the nucleic acid sequence of D65-AC 1 (SEQ ID NO:993), D65-AC6 (SEQ ID NO:994), D65-AC10 (SEQ ID NO:995), D65-AC11 (SEQ ID NO:996), D65-AD3 (SEQ ID NO:997), and D65-AE1 (SEQ ID NO:998).

[0389] FIG. 173-71 is the nucleic acid sequence of D65-AE2 (SEQ ID NO:999), D65-AE10 (SEQ ID NO:1000), D65-AE11 (SEQ ID NO:1001), D65-AE12 (SEQ ID NO:1002), D65-AF1 (SEQ ID NO:1003), and D65-AF5 (SEQ ID NO:1004).

[0390] FIG. 173-72 is the nucleic acid sequence of D65-AF7 (SEQ ID NO:1005), D65-AG11 (SEQ ID NO:1006), D65-CE1 (SEQ ID NO:1007), D65-CE2 (SEQ ID NO:1008), D65-CE7 (SEQ ID NO:1009), and D65-CE9 (SEQ ID NO:1010).

[0391] FIG. 173-73 is the nucleic acid sequence of D65-CE12 (SEQ ID NO:1011), D65-CF3 (SEQ ID NO:1012), D65-CF10 (SEQ ID NO:1013), D65-CF12 (SEQ ID NO:1014), D65-CG2 (SEQ ID NO:1015), D65-CG5 (SEQ ID NO:1016), and D65-CH3 (SEQ ID NO:1017).

[0392] FIG. 173-74 is the nucleic acid sequence of D65-CH4 (SEQ ID NO:1018), D65-CH6 (SEQ ID NO:1019), D65-CH8 (SEQ ID NO:1020), D65-CH9 (SEQ ID NO:1021), D65-CH11 (SEQ ID NO:1022), and D65-CH12 (SEQ ID NO:1023).

[0393] FIG. 173-75 is the nucleic acid sequence of D66-AA4 (SEQ ID NO:1024), D66-AA5 (SEQ ID NO:1025), D66-AA6 (SEQ ID NO:1026), D66-AA9 (SEQ ID NO:1027), and D66-AB5 (SEQ ID NO:1028).

[0394] FIG. 173-76 is the nucleic acid sequence of D66-AB1 (SEQ ID NO:1029), D66-AB7 (SEQ ID NO:1030), D66-AC1 (SEQ ID NO:1031), D66-AC2 (SEQ ID NO:1032), and D66-AC4 (SEQ ID NO:1033).

[0395] FIG. 173-77 is the nucleic acid sequence of D66-AC7 (SEQ ID NO:1034), D66-AD1 (SEQ ID NO:1035), D66-AD3 (SEQ ID NO:1036), and D66-AD6 (SEQ ID NO:1037).

[0396] FIG. 173-78 is the nucleic acid sequence of D66-AD8 (SEQ ID NO:1038), D66-AE1 (SEQ ID NO:1039), D66-AE3 (SEQ ID NO:1040), D66-AE6 (SEQ ID NO:1041), D66-AE8 (SEQ ID NO:1042), and D66-AF3 (SEQ ID NO:2263).

[0397] FIG. 173-79 is the nucleic acid sequence of D66-AF5 (SEQ ID NO:1043), D66-AF8 (SEQ ID NO:1044), D66-AF9 (SEQ ID NO:1045), and D66-AG1 (SEQ ID NO:1046).

[0398] FIG. 173-80 is the nucleic acid sequence of D66-AG4 (SEQ ID NO:1047), D66-AG5 (SEQ ID NO:1048), D66-AH4 (SEQ ID NO:1049), D66-AH5 (SEQ ID NO:1050), D66-AH7 (SEQ ID NO:1051), and D66-AH8 (SEQ ID NO:1052).

[0399] FIG. 173-81 is the nucleic acid sequence of D66-AH9 (SEQ ID NO:1053), D66-BA3 (SEQ ID NO:1054), D66-BA8 (SEQ ID NO:1055), and D66-BB1 (SEQ ID NO:1056).

[0400] FIG. 173-82 is the nucleic acid sequence of D66-BB2 (SEQ ID NO:1057), D66-BB3 (SEQ ID NO:1058), D66-BB5 (SEQ ID NO:1059), and D66-BB7 (SEQ ID NO:1060).

[0401] FIG. 173-83 is the nucleic acid sequence of D66-BB9 (SEQ ID NO:1061), D66-BB10 (SEQ ID NO:1062), D66-BC6 (SEQ ID NO:1063), D66-BD1 (SEQ ID NO:1064), and D66-BD2 (SEQ ID NO:1065).

[0402] FIG. 173-84 is the nucleic acid sequence of D66-BD9 (SEQ ID NO:1066), D67-AA2 (SEQ ID NO:1067), D67-AA3 (SEQ ID NO:1068), D67-AB1 (SEQ ID NO:1069), and D67-AC5 (SEQ ID NO:1070).

[0403] FIG. 173-85 is the nucleic acid sequence of D67-AD1 (SEQ ID NO:1071), D67-AD4 (SEQ ID NO:1072), D67-AD6 (SEQ ID NO:1073), D67-AE2 (SEQ ID NO:1074), and D67-AE6 (SEQ ID NO:1075).

[0404] FIG. 173-86 is the nucleic acid sequence of D67-AF6 (SEQ ID NO:1076), D67-AG1 (SEQ ID NO:1077), D67-AG3 (SEQ ID NO:1078), D67-AG5 (SEQ ID NO:1079), and D67-AG6 (SEQ ID NO:1080).

[0405] FIG. 173-87 is the nucleic acid sequence of D69-AA5 (SEQ ID NO:1081), D69-AB1 (SEQ ID NO:1082), D69-AB8 (SEQ ID NO:1083), D69-AB9 (SEQ ID NO:1084), and D69-AC4 (SEQ ID NO:1085).

[0406] FIG. 173-88 is the nucleic acid sequence of D70A-AB10 (SEQ ID NO:1086), D70A-AC2 (SEQ ID NO:1087), D70A-AC3 (SEQ ID NO:1088), D70A-AD3 (SEQ ID NO:1089), D70A-AD5 (SEQ ID NO:1090), and D70A-AD6 (SEQ ID NO:1091).

[0407] FIG. 173-89 is the nucleic acid sequence of D7OA-AD11 (SEQ ID NO:1092), D70A-AE10 (SEQ ID NO:1093), D70A-AF6 (SEQ ID NO:1094), D70A-AF8 (SEQ ID NO:1095), D70A-AF10 (SEQ ID NO:1096), D70A-AH5 (SEQ ID NO:1097), and D70A-AH8 (SEQ ID NO:1098).

[0408] FIG. 173-90 is the nucleic acid sequence of D70A-BA3 (SEQ ID NO:1099), D70A-BA6 (SEQ ID NO:1100), D70A-BA10 (SEQ ID NO:1101), D70A-BB8 (SEQ ID NO:1102), and D70A-BB11 (SEQ ID NO:1103).

[0409] FIG. 173-91 is the nucleic acid sequence of D70A-BC7 (SEQ ID NO:1104), D70A-BD8 (SEQ ID NO:1105), D70A-BE1 (SEQ ID NO:1106), D70A-BE5 (SEQ ID NO:1107), D70A-BE6 (SEQ ID NO:1108), and D70A-BE8 (SEQ ID NO:1109).

[0410] FIG. 173-92 is the nucleic acid sequence of D70A-BF2 (SEQ ID NO:1110), D70A-BF3 (SEQ ID NO:1111), D70A-BF10 (SEQ ID NO:1112), D70A-BG9 (SEQ ID NO:1113), D70A-BH8 (SEQ ID NO:1114), and D70-AE2 (SEQ ID NO:1115).

[0411] FIG. 173-93 is the nucleic acid sequence of D70-AE6 (SEQ ID NO:1116), D70-AF3 (SEQ ID NO:1117), D70-AG10 (SEQ ID NO:1118), D70-AH7 (SEQ ID NO:1119), D70-BE6 (SEQ ID NO:1120), and D70-BE7 (SEQ ID NO:1121).

[0412] FIG. 173-94 is the nucleic acid sequence of D70A-BC12 (SEQ ID NO:1122), D72-AB2 (SEQ ID NO:1123), D72-AB6 (SEQ ID NO:1124), D73A-AA12 (SEQ ID NO:1125), and D73A-AB4 (SEQ ID NO:1126).

[0413] FIG. 173-95 is the nucleic acid sequence of D73A-AB9 (SEQ ID NO:1127), D73A-AB11 (SEQ ID NO:1128), D73A-AC1 (SEQ ID NO:1129), D73A-AC3 (SEQ ID NO:1130), and D73A-AC8 (SEQ ID NO:1131).

[0414] FIG. 173-96 is the nucleic acid sequence of D73A-AD3 (SEQ ID NO:1132), D73A-AE1 (SEQ ID NO:1133), D73A-AE3 (SEQ ID NO:1134), D73A-AE4 (SEQ ID NO:1135), D73A-AE5 (SEQ ID NO:1136), and D73A-AE9 (SEQ ID NO:1137).

[0415] FIG. 173-97 is the nucleic acid sequence of D73A-AE10 (SEQ ID NO:1138), D73A-AF3 (SEQ ID NO:1139), D73A-AF4 (SEQ ID NO:1140), D73A-AF7 (SEQ ID NO:1141), D73A-AF8 (SEQ ID NO:1142), and D73A-AG11 (SEQ ID NO:1143).

[0416] FIG. 173-98 is the nucleic acid sequence of D73A-AH1 (SEQ ID NO:1144), D73A-AH5 (SEQ ID NO:1145), D73A-AH9 (SEQ ID NO:1146), D73A-AH12 (SEQ ID NO:1147), D73A-BA9 (SEQ ID NO:1148), and D73A-BB3 (SEQ ID NO:1149).

[0417] FIG. 173-99 is the nucleic acid sequence of D73A-BB9 (SEQ ID NO:1150), D73A-BE1 (SEQ ID NO:1151), D73A-BF3 (SEQ ID NO:1152), D73A-BG1 (SEQ ID NO:1153), and D73A-BG3 (SEQ ID NO:1154).

[0418] FIG. 173-100 is the nucleic acid sequence of D73A-BG5 (SEQ ID NO:1155), D73A-BH1 (SEQ ID NO:1156), D73-AC1 (SEQ ID NO:1157), D73-AD8 (SEQ ID NO:1158), and D73-AD12 (SEQ ID NO:1159).

[0419] FIG. 173-101 is the nucleic acid sequence of D80-AB2 (SEQ ID NO:1160), D81-AA5 (SEQ ID NO:1161), D81-AB4 (SEQ ID NO:1162), D81-AB6 (SEQ ID NO:1163), and D81-AC5 (SEQ ID NO:1164).

[0420] FIG. 173-102 is the nucleic acid sequence of D82-AA8 (SEQ ID NO:1165), D82-AC9 (SEQ ID NO:1166), D82-AH9 (SEQ ID NO:1167), and D83-AD10 (SEQ ID NO:1168).

[0421] FIG. 173-103 is the nucleic acid sequence of D83-AG10 (SEQ ID NO:1169), D84-AD3 (SEQ ID NO:1170), D84-AE1 (SEQ ID NO:1171), D84-AF4 (SEQ ID NO:1172), D84-AG1 (SEQ ID NO:1173), and D87-AA1 (SEQ ID NO:1174).

[0422] FIG. 173-104 is the nucleic acid sequence of D87-AA3 (SEQ ID NO:1175), D87A-AA1 (SEQ ID NO:1176), D87A-AB1 (SEQ ID NO:1177), D87A-AB3 (SEQ ID NO:1178), D87A-AC1 (SEQ ID NO:1179), and D87A-AC3 (SEQ ID NO:1180).

[0423] FIG. 173-105 is the nucleic acid sequence of D87A-AF2 (SEQ ID NO:1181), D87A-AG1 (SEQ ID NO:1182), D87A-AH1 (SEQ ID NO:1183), D87A-AH3 (SEQ ID NO:1184), D87-AB2 (SEQ ID NO:1185), and D88-AA11 (SEQ ID NO:1186).

[0424] FIG. 173-106 is the nucleic acid sequence of D88-AB3 (SEQ ID NO:1187), D88-AB6 (SEQ ID NO:1188), D88-AB7 (SEQ ID NO:1189), D88-AB8 (SEQ ID NO:1190), D88-AC5 (SEQ ID NO:1191), and D88-AC9 (SEQ ID NO:1192).

[0425] FIG. 173-107 is the nucleic acid sequence of D88-AD8 (SEQ ID NO:1193), D88-AE5 (SEQ ID NO:1194), D88-AE6 (SEQ ID NO:1195), D88-AE8 (SEQ ID NO:1196), and D91-AA4 (SEQ ID NO:1197).

[0426] FIG. 173-108 is the nucleic acid sequence of D92-AD9 (SEQ ID NO:1198), D92-AE9 (SEQ ID NO:1199), D92-AF8 (SEQ ID NO:1200), D92-AG10 (SEQ ID NO:1201), D92-AH9 (SEQ ID NO:1202), and D93-AA1 (SEQ ID NO:1203).

[0427] FIG. 173-109 is the nucleic acid sequence of D93-AA2 (SEQ ID NO:1204), D93-AB1 (SEQ ID NO:1205), D93-AC3 (SEQ ID NO:1206), D93-AC4 (SEQ ID NO:1207), and D93-AD1 (SEQ ID NO:1208).

[0428] FIG. 173-110 is the nucleic acid sequence of D93-AE3 (SEQ ID NO:1209), D93-AE4 (SEQ ID NO:1210), D93-AF3 (SEQ ID NO:1211), D93-AG1 (SEQ ID NO:1212), D93-AH2 (SEQ ID NO:1213), and D93-AH3 (SEQ ID NO:1214).

[0429] FIG. 173-111 is the nucleic acid sequence of D93-AH4 (SEQ ID NO:1215), D93-BA10 (SEQ ID NO:1216), D93-BA12 (SEQ ID NO:1217), D93-BD11 (SEQ ID NO:1218), D93-BE11 (SEQ ID NO:1219), and D93-BF12 (SEQ ID NO:1220).

[0430] FIG. 173-112 is the nucleic acid sequence of D94-AA2 (SEQ ID NO:1221), D94-AA3 (SEQ ID NO:1222), D94-AB1 (SEQ ID NO:1223), D94-AB2 (SEQ ID NO:1224), and D94-AC3 (SEQ ID NO:1225).

[0431] FIG. 173-113 is the nucleic acid sequence of D94-AD1 (SEQ ID NO:1226), D94-AE1 (SEQ ID NO:1227), D94-AE3 (SEQ ID NO:1228), D94-AG2 (SEQ ID NO:1229), and D94-AH1 (SEQ ID NO:1230).

[0432] FIG. 173-114 is the nucleic acid sequence of D94-AH2 (SEQ ID NO:1231), D94-AH3 (SEQ ID NO:1232), D95-AC1 (SEQ ID NO:1233), D95-AD2 (SEQ ID NO:1234), D96-AA3 (SEQ ID NO:1235), and D96-AA4 (SEQ ID NO:1236).

[0433] FIG. 173-115 is the nucleic acid sequence of D96-AA7 (SEQ ID NO:1237), D96-AB7 (SEQ ID NO:2264), D96-AC5 (SEQ ID NO:1238), D96-AC6 (SEQ ID NO:1239), and D96-AD6 (SEQ ID NO:1240).

[0434] FIG. 173-116 is the nucleic acid sequence of D96-AE6 (SEQ ID NO:1241), D96-AG3 (SEQ ID NO:1242), D96-AH8 (SEQ ID NO:1243), D97-AA1 (SEQ ID NO:1244), D97-AB1 (SEQ ID NO:1245), and D97-AB3 (SEQ ID NO:1246).

[0435] FIG. 173-117 is the nucleic acid sequence of D97-AD1 (SEQ ID NO:1247), D97-AD2 (SEQ ID NO:1248), D97-AD4 (SEQ ID NO:1249), D97-AE1 (SEQ ID NO:1250), and D97-AE2 (SEQ ID NO:1251).

[0436] FIG. 173-118 is the nucleic acid sequence of D97-AE4 (SEQ ID NO:1252), D97-AF3 (SEQ ID NO:1253), D97-AG2 (SEQ ID NO:1254), D97-AG3 (SEQ ID NO:1255), and D97-AH1 (SEQ ID NO:1256).

[0437] FIG. 173-119 is the nucleic acid sequence of D97-AH2 (SEQ ID NO:1257), D97-AH4 (SEQ ID NO:1258), D98-AB2 (SEQ ID NO:1259), D98-AE3 (SEQ ID NO:1260), and D98-AF1 (SEQ ID NO:1261).

[0438] FIG. 173-120 is the nucleic acid sequence of D98-AH2 (SEQ ID NO:1262), D99-AC5 (SEQ ID NO:1263), D99-AC8 (SEQ ID NO:1264), D99-AD2 (SEQ ID NO:1265), D99-AD3 (SEQ ID NO:1266), and D99-AD4 (SEQ ID NO:1267).

[0439] FIG. 173-121 is the nucleic acid sequence of D99-AD6 (SEQ ID NO:1268), D99-AE1 (SEQ ID NO:1269), D99-AE5 (SEQ ID NO:1270), D99-AE6 (SEQ ID NO:1271), D99-AE7 (SEQ ID NO:1272), and D99-AE8 (SEQ ID NO:1273).

[0440] FIG. 173-122 is the nucleic acid sequence of D99-AF1 (SEQ ID NO:1274), D99-AF5 (SEQ ID NO:1275), D99-AF7 (SEQ ID NO:1.276), D99-AG2 (SEQ ID NO:1277), D99-AG4 (SEQ ID NO:1278), D99-AG7 (SEQ ID NO:1279), and D99-AH2 (SEQ ID NO:1280).

[0441] FIG. 173-123 is the nucleic acid sequence of D99-AH10 (SEQ ID NO:1281), D99-DA3 (SEQ ID NO:1282), D99-DB5 (SEQ ID NO:1283), D99-DC2 (SEQ ID NO:1284), and D99-DC3 (SEQ ID NO:1285).

[0442] FIG. 173-124 is the nucleic acid sequence of D99-DD5 (SEQ ID NO:1286), D99-DG4 (SEQ ID NO:1287), D100A-AA4 (SEQ ID NO:1288), and D101-BG2 (SEQ ID NO:1289).

[0443] FIG. 173-125 is the nucleic acid sequence of D101A-AC2 (SEQ ID NO:1290), D101A-AD1 (SEQ ID NO:1291), D101A-AD2 (SEQ ID NO:1292), D101A-AE1 (SEQ ID NO:1293), and D101A-AF1 (SEQ ID NO:1294).

[0444] FIG. 173-126 is the nucleic acid sequence of D101C-AA1 (SEQ ID NO:1295), D101C-AB1 (SEQ ID NO:1296), D101C-AC1 (SEQ ID NO:1297), D101C-AD3 (SEQ ID NO:1298), and D101C-BD12 (SEQ ID NO:1299).

[0445] FIG. 173-127 is the nucleic acid sequence of D101C-BE12 (SEQ ID NO:1300), D101C-BF12 (SEQ ID NO:1301), D101C-BG12 (SEQ ID NO:1302), and D101D-AB6 (SEQ ID NO:1303).

[0446] FIG. 173-128 is the nucleic acid sequence of D101D-AC5 (SEQ ID NO:1304), D101D-AG5 (SEQ ID NO:1305), D101D-AG6 (SEQ ID NO:1306), D101D-AH4 (SEQ ID NO:1307), and D101D-AH6 (SEQ ID NO:1308).

[0447] FIG. 173-129 is the nucleic acid sequence of D101D-BB11 (SEQ ID NO:1309), D101D-BD11 (SEQ ID NO:1310), D107-AA3 (SEQ ID NO:1311), D107-AB2 (SEQ ID NO:1312), D107-AC2 (SEQ ID NO:1313), and D107-AC3 (SEQ ID NO:1314).

[0448] FIG. 173-130 is the nucleic acid sequence of D107-AD2 (SEQ ID NO:1315), D107-AD3 (SEQ ID NO:1316), D107-AF1 (SEQ ID NO:1317), D107-AH1 (SEQ ID NO:1318), D108-AA6 (SEQ ID NO:1319), and D108-AB4 (SEQ ID NO:1320).

[0449] FIG. 173-131 is the nucleic acid sequence of D108-AB5 (SEQ ID NO:1321), D108-AC6 (SEQ ID NO:1322), D108-AD6 (SEQ ID NO:1323), D108-AF6 (SEQ ID NO:1324), D109-AA7 (SEQ ID NO:1325), and D109-AA8 (SEQ ID NO:1326).

[0450] FIG. 173-132 is the nucleic acid sequence of D109-AA9 (SEQ ID NO:1327), D109-AB8 (SEQ ID NO:1328), D109-AC7 (SEQ ID NO:1329), D109-AC8 (SEQ ID NO:1330), D109-AC9 (SEQ ID NO:1331), and D109-AE7 (SEQ ID NO:1332).

[0451] FIG. 173-133 is the nucleic acid sequence of D109-AF9 (SEQ ID NO:1333), D109-AH7 (SEQ ID NO:1334), D110-AB11 (SEQ ID NO:1335), D110-AF10 (SEQ ID NO:1336), D111-AA2 (SEQ ID NO:1337), and D111-AB1 (SEQ ID NO:1338).

[0452] FIG. 173-134 is the nucleic acid sequence of D111-AB3 (SEQ ID NO:1339), D111-AC3 (SEQ ID NO:1340), D111-AD1 (SEQ ID NO:1341), D111-AF1 (SEQ ID NO:1342), and D111-AG3 (SEQ ID NO:1343).

[0453] FIG. 173-135 is the nucleic acid sequence of D111-AH1 (SEQ ID NO:1344), D111-AH2 (SEQ ID NO:1345), D112-AD6 (SEQ ID NO:1346), D112-AE6 (SEQ ID NO:1347), and D112-AF5 (SEQ ID NO:1348).

[0454] FIG. 173-136 is the nucleic acid sequence of D112-AG5 (SEQ ID NO:1349), D112-AH4 (SEQ ID NO:1350), D113-AA9 (SEQ ID NO:1351), D113A-AC3 (SEQ ID NO:1352), and D113A-AD1 (SEQ ID NO:1353).

[0455] FIG. 173-137 is the nucleic acid sequence of D113A-AD3 (SEQ ID NO:1354), D113A-AF3 (SEQ ID NO:1355), D113A-AG2 (SEQ ID NO:1356), D113A-AH2 (SEQ ID NO:1357), D113-AB9 (SEQ ID NO:1358), and D113-AC7 (SEQ ID NO:1359).

[0456] FIG. 173-138 is the nucleic acid sequence of D113-AD8 (SEQ ID NO:1360), D113-AD9 (SEQ ID NO:1361), D113-AE7 (SEQ ID NO:1362), D113-AF8 (SEQ ID NO:1363), and D113-AF9 (SEQ ID NO:1364).

[0457] FIG. 173-139 is the nucleic acid sequence of D113-AG7 (SEQ ID NO:1365), D113-AG9 (SEQ ID NO:1366), D114-AE10 (SEQ ID NO:1367), D114-AF11 (SEQ ID NO:1368), and D115-AA6 (SEQ ID NO:1369).

[0458] FIG. 173-140 is the nucleic acid sequence of D133-AA7 (SEQ ID NO:1370), D133-AE8 (SEQ ID NO:1371), D133-AF9 (SEQ ID NO:1372), D133-AG8 (SEQ ID NO:1373), D138-AD10 (SEQ ID NO:1374), and D139-AD1 (SEQ ID NO:1375).

[0459] FIG. 173-141 is the nucleic acid sequence of D140-AA4 (SEQ ID NO:1376), D140-AD4 (SEQ ID NO:1377), D140-AF4 (SEQ ID NO:1378), D141-AA7 (SEQ ID NO:1379), D141-AB7 (SEQ ID NO:1380), and D142-AB11 (SEQ ID NO:1381).

[0460] FIG. 173-142 is the nucleic acid sequence of D142-AC10 (SEQ ID NO:1382), D142-AE10 (SEQ ID NO:1383), D142-AE11 (SEQ ID NO:1384), D142-AF10 (SEQ ID NO:1385), D144-AA1 (SEQ ID NO:1386), and D144A-AA9 (SEQ ID NO:1387).

[0461] FIG. 173-143 is the nucleic acid sequence of D144A-AB12 (SEQ ID NO:1388), D144A-AC9 (SEQ ID NO:1389), D144A-AC10 (SEQ ID NO:1390), D144A-AD12 (SEQ ID NO:1391), D144A-AE12 (SEQ ID NO:1392), and D144A-AF11 (SEQ ID NO:1393).

[0462] FIG. 173-144 is the nucleic acid sequence of D144A-AF12 (SEQ ID NO:1394), D144A-AG11 (SEQ ID NO:1395), D144A-AH9 (SEQ ID NO:1396), D144A-AH11 (SEQ ID NO:1397), and D144-AE4 (SEQ ID NO:1398).

[0463] FIG. 173-145 is the nucleic acid sequence of D144-AH3 (SEQ ID NO:1399), D145-AA8 (SEQ ID NO:1400), D145-AC10 (SEQ ID NO:1401), D145-AD7 (SEQ ID NO:1402), D145-AD9 (SEQ ID NO:1403), and D145-AD10 (SEQ ID NO:1404).

[0464] FIG. 173-146 is the nucleic acid sequence of D145-AE7 (SEQ ID NO:1405), D145-AF7 (SEQ ID NO:1406), D145-AF8 (SEQ ID NO:1407), D145-AG8 (SEQ ID NO:1408), D145-AG9 (SEQ ID NO:1409), and D145-AG10 (SEQ ID NO:1410).

[0465] FIG. 173-147 is the nucleic acid sequence of D145-AH9 (SEQ ID NO:1411), D146-BB2 (SEQ ID NO:1412), D146-BC1 (SEQ ID NO:1413), D146-BD1 (SEQ ID NO:1414), and D146-BD2 (SEQ ID NO:1415).

[0466] FIG. 173-148 is the nucleic acid sequence of D146-BF2 (SEQ ID NO:1416), D147-AE2 (SEQ ID NO:1417), D150-AA2 (SEQ ID NO:1418), D150-AC2 (SEQ ID NO:1419), and D150-AD1 (SEQ ID NO:1420).

[0467] FIG. 173-149 is the nucleic acid sequence of D151-AA1 (SEQ ID NO:1421), D152-AA2 (SEQ ID NO:1422), D152-AB2 (SEQ ID NO:1423), D152-AC1 (SEQ ID NO:1424), D152-AD2 (SEQ ID NO:1425), and D152-AG2 (SEQ ID NO:1426).

[0468] FIG. 173-150 is the nucleic acid sequence of D152-AH2 (SEQ ID NO:1427), D153-AA7 (SEQ ID NO:1428), D153-AB2 (SEQ ID NO:1429), D153-AF2 (SEQ ID NO:1430), D153-AF7 (SEQ ID NO:1431), and D153-AF9 (SEQ ID NO:1432).

[0469] FIG. 173-151 is the nucleic acid sequence of D153-AG6 (SEQ ID NO:1433), D153-AG7 (SEQ ID NO:1434), D153-AG9 (SEQ ID NO:1435), D153-AH6 (SEQ ID NO:1436), and D153-AH9 (SEQ ID NO:1437).

[0470] FIG. 173-152 is the nucleic acid sequence of D154-AC2 (SEQ ID NO:1438), D154-AE9 (SEQ ID NO:1439), D155-AB1 (SEQ ID NO:1440), D155-AC1 (SEQ ID NO:1441), and D155-AC2 (SEQ ID NO:1442).

[0471] FIG. 173-153 is the nucleic acid sequence of D155-AE1 (SEQ ID NO:1443), D155-AE2 (SEQ ID NO:1444), D155-AF1 (SEQ ID NO:1445), D155-AF2 (SEQ ID NO:1446), and D155-AH2 (SEQ ID NO:1447).

[0472] FIG. 173-154 is the nucleic acid sequence of D156-AB1 (SEQ ID NO:1448), D156-AC3 (SEQ ID NO:1449), D156-AC4 (SEQ ID NO:1450), D156-AD3 (SEQ ID NO:1451), and D156-AF2 (SEQ ID NO:1452).

[0473] FIG. 173-155 is the nucleic acid sequence of D156-AF4 (SEQ ID NO:1453), D156-AG1 (SEQ ID NO:1454), D156-AG2 (SEQ ID NO:1455), D156-AG4 (SEQ ID NO:1456), and D156-AH1 (SEQ ID NO:1457).

[0474] FIG. 173-156 is the nucleic acid sequence of D157-AG4 (SEQ ID NO:1458), D158-AB8 (SEQ ID NO:1459), D158-AD5 (SEQ ID NO:1460), D158-AD6 (SEQ ID NO:1461), and D158-AD8 (SEQ ID NO:1462).

[0475] FIG. 173-157 is the nucleic acid sequence of D158-AE8 (SEQ ID NO:1463), D159-AD2 (SEQ ID NO:1464), D160-AB4 (SEQ ID NO:1465), D160-AC4 (SEQ ID NO:1466), and D160-AE4 (SEQ ID NO:1467).

[0476] FIG. 173-158 is the nucleic acid sequence of D160-AF4 (SEQ ID NO:1468), D160-AH4 (SEQ ID NO:1469), D161-AE5 (SEQ ID NO:1470), D161-AH5 (SEQ ID NO:1471), D164-AB1 (SEQ ID NO:1472), and D164-AB3 (SEQ ID NO:1473).

[0477] FIG. 173-159 is the nucleic acid sequence of D164-AC1 (SEQ ID NO:1474), D164-AC2 (SEQ ID NO:1475), D164-AC5 (SEQ ID NO:1476), D164-AE1 (SEQ ID NO:1477), and D164-AF1 (SEQ ID NO:1478).

[0478] FIG. 173-160 is the nucleic acid sequence of D165-AH8 (SEQ ID NO:1479), D1177-BB7 (SEQ ID NO:1480), D178-AA6 (SEQ ID NO:1481), D178-AD5 (SEQ ID NO:1482), and D180-AA9 (SEQ ID NO:1483).

[0479] FIG. 173-161 is the nucleic acid sequence of D181-AB6 (SEQ ID NO:1484), D181-AC6 (SEQ ID NO:1485), D181-AD7 (SEQ ID NO:1486), D181-AG7 (SEQ ID NO:1487), and D181-AH6 (SEQ ID NO:1488).

[0480] FIG. 173-162 is the nucleic acid sequence of D182-AA1 (SEQ ID NO:1489), D182-AA2 (SEQ ID NO:1490), D182-AA4 (SEQ ID NO:1491), D182-AB2 (SEQ ID NO:1492), and D182-AC2 (SEQ ID NO:1493).

[0481] FIG. 173-163 is the nucleic acid sequence of D182-AC4 (SEQ ID NO:1494), D182-AD1 (SEQ ID NO:1495), D182-AD3 (SEQ ID NO:1496), D182-AF1 (SEQ ID NO:1497), and D182-AF4 (SEQ ID NO:1498).

[0482] FIG. 173-164 is the nucleic acid sequence of D182-AG1 (SEQ ID NO:1499), D183-AC8 (SEQ ID NO:1500), D185-AB10 (SEQ ID NO:1501), D185-AC10 (SEQ ID NO:1502), D185-AF10 (SEQ ID NO:1503), and D185-BA1 (SEQ ID NO:1504).

[0483] FIG. 173-165 is the nucleic acid sequence of D185-BB3 (SEQ ID NO:1505), D186-AA3 (SEQ ID NO:1506), D186-AB4 (SEQ ID NO:1507), D186-AC2 (SEQ ID NO:1508), D186-AC3 (SEQ ID NO:1509), and D186-AD2 (SEQ ID NO:1510).

[0484] FIG. 173-166 is the nucleic acid sequence of D186-AD3 (SEQ ID NO:1511), D186-AE3 (SEQ ID NO:1512), D187-AB2 (SEQ ID NO:1513), D187-AB3 (SEQ ID NO:1514), D187-AC4 (SEQ ID NO:1515), D187-AE4 (SEQ ID NO:1516), and D187-AF4 (SEQ ID NO:1517).

[0485] FIG. 173-167 is the nucleic acid sequence of D187-AG1 (SEQ ID NO:1518), D187-AG2 (SEQ ID NO:1519), D187-AG3 (SEQ ID NO:1520), D187-AH2 (SEQ ID NO:1521), D184-AA1 (SEQ ID NO:1522), and D188-AC7 (SEQ ID NO:1523).

[0486] FIG. 173-168 is the nucleic acid sequence of D188-AC8 (SEQ ID NO:1524), D188-AD8 (SEQ ID NO:1525), D188-AE8 (SEQ ID NO:1526), D188-AF6 (SEQ ID NO:1527), D188-AG5 (SEQ ID NO:1528), and D188-AG7 (SEQ ID NO:1529).

[0487] FIG. 173-169 is the nucleic acid sequence of D188-AH7 (SEQ ID NO:1530), D189-AA12 (SEQ ID NO:1531), D189-AB10 (SEQ ID NO:1532), D189-AE9 (SEQ ID NO:1533), D189-AE12 (SEQ ID NO:1534), and D189-AF12 (SEQ ID NO:1535).

[0488] FIG. 173-170 is the nucleic acid sequence of D189-AG10 (SEQ ID NO:1536), D190-BA6 (SEQ ID NO:1537), D190-BD6 (SEQ ID NO:1538), D190-BF6 (SEQ ID NO:1539), D190-BG6 (SEQ ID NO:1540), and D190-BH6 (SEQ ID NO:1541).

[0489] FIG. 173-171 is the nucleic acid sequence of D191-BC5 (SEQ ID NO:1542), D191-BD5 (SEQ ID NO:1543), D191-BF5 (SEQ ID NO:1544), D191-BG5 (SEQ ID NO:1545), and D194-AA1 (SEQ ID NO:1546).

[0490] FIG. 173-172 is the nucleic acid sequence of D194-AA2 (SEQ ID NO:1547), D194-AB1 (SEQ ID NO:1548), D194-AB2 (SEQ ID NO:1549), D194-AC1 (SEQ ID NO:1550), and D194-AC2 (SEQ ID NO:1551).

[0491] FIG. 173-173 is the nucleic acid sequence of D194-AD1 (SEQ ID NO:1552), D194-AD2 (SEQ ID NO:1553), D194-AD3 (SEQ ID NO:1554), D194-AE1 (SEQ ID NO:1555), and D194-AE2 (SEQ ID NO:1556).

[0492] FIG. 173-174 is the nucleic acid sequence of D194-AE3 (SEQ ID NO:1557), D194-AF1 (SEQ ID NO:1558), D194-AF2 (SEQ ID NO:1559), D194-AG2 (SEQ ID NO:1560), and D194-AG3 (SEQ ID NO:1561).

[0493] FIG. 173-175 is the nucleic acid sequence of D194-AH1 (SEQ ID NO:1562), D194-AH2 (SEQ ID NO:1563), D194-AH3 (SEQ ID NO:1564), D195-AB6 (SEQ ID NO:1565), D195-AD5 (SEQ ID NO:1566), and D195-AE4 (SEQ ID NO:1567).

[0494] FIG. 173-176 is the nucleic acid sequence of D195-AE5 (SEQ ID NO:1568), D195-AG5 (SEQ ID NO:1569), D195-AH5 (SEQ ID NO:1570), D196-AD7 (SEQ ID NO:1571), and D196-AF7 (SEQ ID NO:1572).

[0495] FIG. 173-177 is the nucleic acid sequence of D196-AG7 (SEQ ID NO:1573), D197-AE8 (SEQ ID NO:1574), D198-AB9 (SEQ ID NO:1575), D198-AC9 (SEQ ID NO:1576), and D198-AF9 (SEQ ID NO:1577).

[0496] FIG. 173-178 is the nucleic acid sequence of D199-AA10 (SEQ ID NO:1578), D199-AB10 (SEQ ID NO:1579), D199-AD10 (SEQ ID NO:1580), D199-AF10 (SEQ ID NO:1581), and D199-AG10 (SEQ ID NO:1582).

[0497] FIG. 173-179 is the nucleic acid sequence of D200-AB11 (SEQ ID NO:1583), D200-AC11 (SEQ ID NO:1584), D200-AD11 (SEQ ID NO:1585), D200-AE11 (SEQ ID NO:1586), and D200-AG11 (SEQ ID NO:1587).

[0498] FIG. 173-180 is the nucleic acid sequence of D200-AH11 (SEQ ID NO:1588), D201-AD12 (SEQ ID NO:1589), D201-AE12 (SEQ ID NO:1590), D201-AF12 (SEQ ID NO:1591), D201-AG12 (SEQ ID NO:1592), and D203-BE11 (SEQ ID NO:1593).

[0499] FIG. 173-181 is the nucleic acid sequence of D203-BF11 (SEQ ID NO:1594), D204-AA1 (SEQ ID NO:1595), D204-AA2 (SEQ ID NO:1596), D204-AA4 (SEQ ID NO:1597), and D204-AB1 (SEQ ID NO:1598).

[0500] FIG. 173-182 is the nucleic acid sequence of D204-AB3 (SEQ ID NO:1599), D204-AC1 (SEQ ID NO:1600), D204-AC2 (SEQ ID NO:1601), D204-AC4 (SEQ ID NO:1602), and D204-AD1 (SEQ ID NO:1603).

[0501] FIG. 173-183 is the nucleic acid sequence of D204-AD2 (SEQ ID NO:1604), D204-AD3 (SEQ ID NO:1605), D204-AD4 (SEQ ID NO:1606), D204-AE3 (SEQ ID NO:1607), and D204-AE4 (SEQ ID NO:1608).

[0502] FIG. 173-184 is the nucleic acid sequence of D204-AF1 (SEQ ID NO:1609), D204-AF3 (SEQ ID NO:1610), D204-AF4 (SEQ ID NO:1611), D204-AG1 (SEQ ID NO:1612), and D204-AG2 (SEQ ID NO:1613).

[0503] FIG. 173-185 is the nucleic acid sequence of D204-AG3 (SEQ ID NO:1614), D203-BA11 (SEQ ID NO:1615), D204-AG4 (SEQ ID NO:1616), D204-AH2 (SEQ ID NO:1617), and D204-AH1 (SEQ ID NO:1618).

[0504] FIG. 173-186 is the nucleic acid sequence of D204-AH3 (SEQ ID NO:1619), D205-BC9 (SEQ ID NO:1620), D205-BD9 (SEQ ID NO:1621), D206-CB3 (SEQ ID NO:1622), D206-CE3 (SEQ ID NO:1623), and D206-CF3 (SEQ ID NO:1624).

[0505] FIG. 173-187 is the nucleic acid sequence of D206-CG1 (SEQ ID NO:1625), D206-CH1 (SEQ ID NO:1626), D210-BF4 (SEQ ID NO:1627), and D210-BF6 (SEQ ID NO:1628).

[0506] FIG. 173-188 is the nucleic acid sequence of D210-BH6 (SEQ ID NO:1629), D211-BA9 (SEQ ID NO:1630), D211-BB8 (SEQ ID NO:1631), D211-BB9 (SEQ ID NO:1632), D211-BC9 (SEQ ID NO:1633), and D211-BD8 (SEQ ID NO:1634).

[0507] FIG. 173-189 is the nucleic acid sequence of D211-BD9 (SEQ ID NO:1635), D211-BE7 (SEQ ID NO:1636), D211-BE8 (SEQ ID NO:1637), and D211-BF8 (SEQ ID NO:1638).

[0508] FIG. 173-190 is the nucleic acid sequence of D211-BF9 (SEQ ID NO:1639), D211-BG8 (SEQ ID NO:1640), D211-BH7 (SEQ ID NO:1641), D212-BB11 (SEQ ID NO:1642), and D212-BB12 (SEQ ID NO:1643).

[0509] FIG. 173-191 is the nucleic acid sequence of D212-BD10 (SEQ ID NO:1644), D212-BD11 (SEQ ID NO:1645), D212-BE10 (SEQ ID NO:1646), D212-BE11 (SEQ ID NO:1647), D212-BF10 (SEQ ID NO:1648), and D212-BF11 (SEQ ID NO:1649).

[0510] FIG. 173-192 is the nucleic acid sequence of D213-BD1 (SEQ ID NO:1650), D213-BF2 (SEQ ID NO:1651), D214-AA1 (SEQ ID NO:1652), D214-AA3 (SEQ ID NO:1653), and D214-AC1 (SEQ ID NO:1654).

[0511] FIG. 173-193 is the nucleic acid sequence of D214-AE1 (SEQ ID NO:1655), D214-AE3 (SEQ ID NO:1656), D214-AG1 (SEQ ID NO:1657), D214-AH2 (SEQ ID NO:1658), and D214-AH3 (SEQ ID NO:1659).

[0512] FIG. 173-194 is the nucleic acid sequence of D216-AB7 (SEQ ID NO:1660), D216-AC8 (SEQ ID NO:1661), D216-AH9 (SEQ ID NO:1662), D219-BA1 (SEQ ID NO:1663), D219-BB1 (SEQ ID NO:1664), and D219-BB2 (SEQ ID NO:1665).

[0513] FIG. 173-195 is the nucleic acid sequence of D219-BC1 (SEQ ID NO:1666), D219-BD1 (SEQ ID NO:1667), D219-BD2 (SEQ ID NO:1668), D219-BE1 (SEQ ID NO:1669), D219-BE2 (SEQ ID NO:1670), and D219-BF2 (SEQ ID NO:1671).

[0514] FIG. 173-196 is the nucleic acid sequence of D219-BH1 (SEQ ID NO:1672), D220-BF6 (SEQ ID NO:1673), D220-BD6 (SEQ ID NO:1674), D223-BC11 (SEQ ID NO:1675), and D221-BC7 (SEQ ID NO:1676).

[0515] FIG. 173-197 is the nucleic acid sequence of D227-AE3 (SEQ ID NO:1677), D223-BB10 (SEQ ID NO:1678), D221-BF9 (SEQ ID NO:1679), D229-AD2 (SEQ ID NO:1680), D229-AE2 (SEQ ID NO:1681), D229-AF2 (SEQ ID NO:1682), and D229-AG1 (SEQ ID NO:1683).

[0516] FIG. 173-198 is the nucleic acid sequence of D229-AH1 (SEQ ID NO:1684), D230-AB1 (SEQ ID NO:1685), D230-AC1 (SEQ ID NO:1686), D230-AC2 (SEQ ID NO:1687), D230-AF2 (SEQ ID NO:1688), and D230-AG1 (SEQ ID NO:1689).

[0517] FIG. 173-199 is the nucleic acid sequence of D230-AG2 (SEQ ID NO:1690), D231-AA1 (SEQ ID NO:1691), D231-AA2 (SEQ ID NO:1692), D231-AA3 (SEQ ID NO:1693), D231-AC1 (SEQ ID NO:1694), and D231-AC2 (SEQ ID NO:1695).

[0518] FIG. 173-200 is the nucleic acid sequence of D231-AD2 (SEQ ID NO:1696), D231-AE1 (SEQ ID NO:1697), D231-AG2 (SEQ ID NO:1698), D231-AH1 (SEQ ID NO:1699), D231-AH2 (SEQ ID NO:1700), and D231-AH3 (SEQ ID NO:1701).

[0519] FIG. 173-201 is the nucleic acid sequence of D232-AD4 (SEQ ID NO:1702), D232-AE5 (SEQ ID NO:1703), D232-AE6 (SEQ ID NO:1704), and D232-AF5 (SEQ ID NO:1705).

[0520] FIG. 173-202 is the nucleic acid sequence of D233-AA7 (SEQ ID NO:1706), D233-AA8 (SEQ ID NO:1707), D233-AB7 (SEQ ID NO:1708), D233-AC7 (SEQ ID NO:1709), and D233-AC8 (SEQ ID NO:1710).

[0521] FIG. 173-203 is the nucleic acid sequence of D233-AH9 (SEQ ID NO:1711), D234-AA11 (SEQ ID NO:1712), D234-AC11 (SEQ ID NO:1713), D234-AD11 (SEQ ID NO:1714), D238-AA2 (SEQ ID NO:1715), and D239-BC3 (SEQ ID NO:1716).

[0522] FIG. 173-204 is the nucleic acid sequence of D239-BD4 (SEQ ID NO:1717), D239-BD6 (SEQ ID NO:1718), D239-BE4 (SEQ ID NO:1719), D240-BB7 (SEQ ID NO:1720), and D241-BC9 (SEQ ID NO:1721).

[0523] FIG. 173-205 is the nucleic acid sequence of D241-BE9 (SEQ ID NO:1722), D242-BA11 (SEQ ID NO:1723), D242-BB11 (SEQ ID NO:1724), D242-BB12 (SEQ ID NO:1725), D242-BC12 (SEQ ID NO:1726), and D242-BF12 (SEQ ID NO:1727).

[0524] FIG. 173-206 is the nucleic acid sequence of D242-BG12 (SEQ ID NO:1728), D242-BH11 (SEQ ID NO:1729), D244-AA5 (SEQ ID NO:1730), D244-AA6 (SEQ ID NO:1731), D244-AF6 (SEQ ID NO:1732), and D245-AE7 (SEQ ID NO:1733).

[0525] FIG. 173-207 is the nucleic acid sequence of D245-AE8 (SEQ ID NO:1734), D245-AF7 (SEQ ID NO:1735), D246-AA12 (SEQ ID NO:1736), D248-AG4 (SEQ ID NO:1737), and D249-AG9 (SEQ ID NO:1738).

[0526] FIG. 173-208 is the nucleic acid sequence of D250-AE10 (SEQ ID NO:1739), D251-AF2 (SEQ ID NO:1740), D251-AG2 (SEQ ID NO:1741), D252-AA5 (SEQ ID NO:1742), and D252-AB5 (SEQ ID NO:1743).

[0527] FIG. 173-209 is the nucleic acid sequence of D252-AC5 (SEQ ID NO:1744), D252-AD5 (SEQ ID NO:1745), D252-AF4 (SEQ ID NO:1746), D252-AF5 (SEQ ID NO:1747), D252-AG5 (SEQ ID NO:1748), and D254-AE2 (SEQ ID NO:1749).

[0528] FIG. 173-210 is the nucleic acid sequence of D254-AG2 (SEQ ID NO:1750), D255-AA5 (SEQ ID NO:1751), D255-AA6 (SEQ ID NO:1752), D255-AD5 (SEQ ID NO:1753), and D255-AD6 (SEQ ID NO:1754).

[0529] FIG. 173-211 is the nucleic acid sequence of D255-AF5 (SEQ ID NO:1755), D255-AG5 (SEQ ID NO:1756), D256-AA10 (SEQ ID NO:1757), and D256-AB10 (SEQ ID NO:1758).

[0530] FIG. 173-212 is the nucleic acid sequence of D256-AC10 (SEQ ID NO:1759), D256-AE10 (SEQ ID NO:1760), D256-AF9 (SEQ ID NO:1761), D256-AF10 (SEQ ID NO:1762), and D256-AG10 (SEQ ID NO:1763).

[0531] FIG. 173-213 is the nucleic acid sequence of D256-AH10 (SEQ ID NO:1764), D258-AC5 (SEQ ID NO:1765), D263-AE12 (SEQ ID NO:1766), D263-AF12 (SEQ ID NO:1767), and D263-AH12 (SEQ ID NO:1768).

[0532] FIG. 173-214 is the nucleic acid sequence of D264-AA1 (SEQ ID NO:1769), D264-AA2 (SEQ ID NO:1770), D264-AA3 (SEQ ID NO:1771), D264-AB2 (SEQ ID NO:1772), and D264-AC3 (SEQ ID NO:1773).

[0533] FIG. 173-215 is the nucleic acid sequence of D264-AD3 (SEQ ID NO:1774), D264-AE1 (SEQ ID NO:1775), D264-AE2 (SEQ ID NO:1776), and D264-AE3 (SEQ ID NO:1777).

[0534] FIG. 173-216 is the nucleic acid sequence of D264-AF2 (SEQ ID NO:1778), D264-AG2 (SEQ ID NO:1779), D264-AH2 (SEQ ID NO:1780), and D265-AA4 (SEQ ID NO:1781).

[0535] FIG. 173-217 is the nucleic acid sequence of D265-AA6 (SEQ ID NO:1782), D265-AC5 (SEQ ID NO:1783), D265-AC6 (SEQ ID NO:1784), and D265-AD4 (SEQ ID NO:1785).

[0536] FIG. 173-218 is the nucleic acid sequence of D265-AD5 (SEQ ID NO:1786), D266-AB7 (SEQ ID NO:1787), D266-AB8 (SEQ ID NO:1788), D266-AC9 (SEQ ID NO:1789), and D266-AD7 (SEQ ID NO:1790).

[0537] FIG. 173-219 is the nucleic acid sequence of D267-AD10 (SEQ ID NO:1791), D268-AA2 (SEQ ID NO:1792), D268-AC3 (SEQ ID NO:1793), D268-AD1 (SEQ ID NO:1794), and D268-AD2 (SEQ ID NO:1795).

[0538] FIG. 173-220 is the nucleic acid sequence of D268-AD3 (SEQ ID NO:1796), D268-AE3 (SEQ ID NO:1797), D268-AG2 (SEQ ID NO:1798), and D268-AG3 (SEQ ID NO:1799).

[0539] FIG. 173-221 is the nucleic acid sequence of D269-AA5 (SEQ ID NO:1800), D269-AD4 (SEQ ID NO:1801), D269-AE4 (SEQ ID NO:1802), D269-AF5 (SEQ ID NO:1803), D269-AF6 (SEQ ID NO:1804), and D270-AA8 (SEQ ID NO:1805).

[0540] FIG. 173-222 is the nucleic acid sequence of D270-AB9 (SEQ ID NO:1806), D270-AD8 (SEQ ID NO:1807), D270-AD9 (SEQ ID NO:1808), D270-AE9 (SEQ ID NO:1809), and D270-AF8 (SEQ ID NO:1810).

[0541] FIG. 173-223 is the nucleic acid sequence of D271-AG11 (SEQ ID NO:1811), D271-AH11 (SEQ ID NO:1812), D276-AD5 (SEQ ID NO:1813), and D276-AG6 (SEQ ID NO:1814).

[0542] FIG. 173-224 is the nucleic acid sequence of D276-AH4 (SEQ ID NO:1815), D276-AH6 (SEQ ID NO:1816), D277-AE8 (SEQ ID NO:1817), D277-AF9 (SEQ ID NO:1818), and D277-AH9 (SEQ ID NO:1819).

[0543] FIG. 173-225 is the nucleic acid sequence of D278-AF10 (SEQ ID NO:1820), D279-AA3 (SEQ ID NO:1821), D279-AB2 (SEQ ID NO:1822), D279-AC1 (SEQ ID NO:1823), and D279-AD2 (SEQ ID NO:1824).

[0544] FIG. 173-226 is the nucleic acid sequence of D279-AE1 (SEQ ID NO:1825), D279-AE3 (SEQ ID NO:1826), D279-AG3 (SEQ ID NO:1827), D279-BA1 (SEQ ID NO:1828), and D279-BA2 (SEQ ID NO:1829).

[0545] FIG. 173-227 is the nucleic acid sequence of D279-BB3 (SEQ ID NO:1830), D279-BC2 (SEQ ID NO:1831), D279-BD2 (SEQ ID NO:1832), D279-BE2 (SEQ ID NO:1833), and D279-BF3 (SEQ ID NO:1834).

[0546] FIG. 173-228 is the nucleic acid sequence of D279-BG1 (SEQ ID NO:1835), D279-BH3 (SEQ ID NO:1836), D280-AB5 (SEQ ID NO:1837), D280-AB6 (SEQ ID NO:1838), and D280-AC4 (SEQ ID NO:1839).

[0547] FIG. 173-229 is the nucleic acid sequence of D280-AC6 (SEQ ID NO:1840), D280-AD4 (SEQ ID NO:1841), D280-AD5 (SEQ ID NO:1842), D280-AD6 (SEQ ID NO:1843), and D280-AE4 (SEQ ID NO:1844).

[0548] FIG. 173-230 is the nucleic acid sequence of D280-AE5 (SEQ ID NO:1845), D280-AE6 (SEQ ID NO:1846), D280-AF5 (SEQ ID NO:1847), D280-AF6 (SEQ ID NO:1848), and D280-AG4 (SEQ ID NO:1849).

[0549] FIG. 173-231 is the nucleic acid sequence of D280-AG5 (SEQ ID NO:1850), D280-AG6 (SEQ ID NO:1851), D280-AH4 (SEQ ID NO:1852), D280-AH5 (SEQ ID NO:1853), and D280-BC4 (SEQ ID NO:1854).

[0550] FIG. 173-232 is the nucleic acid sequence of D280-BD4 (SEQ ID NO:1855), D280-BE4 (SEQ ID NO:1856), D280-BE6 (SEQ ID NO:1857), and D280-BF4 (SEQ ID NO:1858).

[0551] FIG. 173-233 is the nucleic acid sequence of D280-BG4 (SEQ ID NO:1859), D280-BH4 (SEQ ID NO:1860), D280-BH6 (SEQ ID NO:1861), D281-AA8 (SEQ ID NO:1862), and D281-AD7 (SEQ ID NO:1863).

[0552] FIG. 173-234 is the nucleic acid sequence of D281-AD8 (SEQ ID NO:1864), D281-AE7 (SEQ ID NO:1865), D281-AE8 (SEQ ID NO:1866), D281-AE9 (SEQ ID NO:1867), D281-AG7 (SEQ ID NO:1868), and D282-AB10 (SEQ ID NO:1869).

[0553] FIG. 173-235 is the nucleic acid sequence of D282-AB11 (SEQ ID NO:1870), D282-AD10 (SEQ ID NO:1871), D282-AH11 (SEQ ID NO:1872), D282-BA10 (SEQ ID NO:1873), D282-BB10 (SEQ ID NO:1874), and D282-BD10 (SEQ ID NO:1875).

[0554] FIG. 173-236 is the nucleic acid sequence of D288-AB3 (SEQ ID NO:1876), D289-AA4 (SEQ ID NO:1877), D289-AA6 (SEQ ID NO:1878), D289-AB4 (SEQ ID NO:1879), and D289-AB6 (SEQ ID NO:1880).

[0555] FIG. 173-237 is the nucleic acid sequence of D289-AD4 (SEQ ID NO:1881), D289-AE4 (SEQ ID NO:1882), D289-AE6 (SEQ ID NO:1883), D289-AF4 (SEQ ID NO:1884), and D289-AF6 (SEQ ID NO:1885).

[0556] FIG. 173-238 is the nucleic acid sequence of D289-AG4 (SEQ ID NO:1886), D289-AG6 (SEQ ID NO:1887), D289-AH4 (SEQ ID NO:1888), D289-AH6 (SEQ ID NO:1889), and D290-AA7 (SEQ ID NO:1890).

[0557] FIG. 173-239 is the nucleic acid sequence of D290-AA8 (SEQ ID NO:1891), D290-AA9 (SEQ ID NO:1892), D290-AB7 (SEQ ID NO:1893), D290-AB9 (SEQ ID NO:1894), and D290-AC8 (SEQ ID NO:1895).

[0558] FIG. 173-240 is the nucleic acid sequence of D290-AC9 (SEQ ID NO:1896), D290-AD7 (SEQ ID NO:1897), D290-AD8 (SEQ ID NO:1898), D290-AD9 (SEQ ID NO:1899), and D291-AA12 (SEQ ID NO:1900).

[0559] FIG. 173-241 is the nucleic acid sequence of D291-AB10 (SEQ ID NO:1901), D291-AB11 (SEQ ID NO:1902), D291-AC12 (SEQ ID NO:1903), D291-AD11 (SEQ ID NO:1904), and D291-AD12 (SEQ ID NO:1905).

[0560] FIG. 173-242 is the nucleic acid sequence of D291-AE10 (SEQ ID NO:1906), D291-AE12 (SEQ ID NO:1907), D291-AF10 (SEQ ID NO:1908), D291-AF12 (SEQ ID NO:1909), and D291-AG11 (SEQ ID NO:1910).

[0561] FIG. 173-243 is the nucleic acid sequence of D291-AG12 (SEQ ID NO:1911), D291-AH11 (SEQ ID NO:1912), D292-AA2 (SEQ ID NO:1913), D292-AA3 (SEQ ID NO:1914), D292-AB2 (SEQ ID NO:1915), and D292-AC2 (SEQ ID NO:1916).

[0562] FIG. 173-244 is the nucleic acid sequence of D292-AD1 (SEQ ID NO:1917), D292-AD2 (SEQ ID NO:1918), D292-AE1 (SEQ ID NO:1919), D292-AE2 (SEQ ID NO:1920), D292-AF1 (SEQ ID NO:1921), D292-AF3 (SEQ ID NO:1922), and D292-AH3 (SEQ ID NO:1923).

[0563] FIG. 173-245 is the nucleic acid sequence of D291-AA10 (SEQ ID NO:1924), D294-AB7 (SEQ ID NO:1925), D294-AB8 (SEQ ID NO:1926), D294-AB9 (SEQ ID NO:1927), and D294-AC7 (SEQ ID NO:1928).

[0564] FIG. 173-246 is the nucleic acid sequence of D294-AC8 (SEQ ID NO:1929), D294-AE9 (SEQ ID NO:1930), D294-AG8 (SEQ ID NO:1931), D294-AH7 (SEQ ID NO:1932), and D295-AA3 (SEQ ID NO:1933).

[0565] FIG. 173-247 is the nucleic acid sequence of D295-AB1 (SEQ ID NO:1934), D295-AB2 (SEQ ID NO:1935), D295-AC2 (SEQ ID NO:1936), D295-AC3 (SEQ ID NO:1937), and D295-AD1 (SEQ ID NO:1938).

[0566] FIG. 173-248 is the nucleic acid sequence of D295-AD2 (SEQ ID NO:1939), D295-AE3 (SEQ ID NO:1940), D295-AF1 (SEQ ID NO:1941), D295-AF2 (SEQ ID NO:1942), and D295-AG3 (SEQ ID NO:1943).

[0567] FIG. 173-249 is the nucleic acid sequence of D295-AH1 (SEQ ID NO:1944), D296-AA6 (SEQ ID NO:1945), D296-AE5 (SEQ ID NO:1946), D296-AF5 (SEQ ID NO:1947), and D296-AG4 (SEQ ID NO:1948).

[0568] FIG. 173-250 is the nucleic acid sequence of D296-AG5 (SEQ ID NO:1949), D297-AA7 (SEQ ID NO:1950), D297-AA8 (SEQ ID NO:1951), D297-AB7 (SEQ ID NO:1952), and D297-AE7 (SEQ ID NO:1953).

[0569] FIG. 173-251 is the nucleic acid sequence of D297-AF7 (SEQ ID NO:1954), D298-AA10 (SEQ ID NO:1955), D298-AB11 (SEQ ID NO:1956), D298-AF11 (SEQ ID NO:1957), and D298-AG12 (SEQ ID NO:1958).

[0570] FIG. 173-252 is the nucleic acid sequence of D35-40 (SEQ ID NO:1959), D35-AC6 (SEQ ID NO:1960), D35-BB2 (SEQ ID NO:1961), D55-AB9 (SEQ ID NO:1962), and D55-BB1 (SEQ ID NO:1963).

[0571] FIG. 173-253 is the nucleic acid sequence of D55-BB2 (SEQ ID NO:1964), D55-BB3 (SEQ ID NO:1965), D55-BB7 (SEQ ID NO:1966), D56-AA1 (SEQ ID NO:1967), D56-AE4 (SEQ ID NO:1968), and D56-AE9 (SEQ ID NO:1969).

[0572] FIG. 173-254 is the nucleic acid sequence of D56-AD1 (SEQ ID NO:1970), D56-AG12 (SEQ ID NO:1971), D56-AH11 (SEQ ID NO:1972), D57-AA5 (SEQ ID NO:1973), and D57-AA7 (SEQ ID NO:1974).

[0573] FIG. 173-255 is the nucleic acid sequence of D57-AB10 (SEQ ID NO:1975), D57-AC2 (SEQ ID NO:1976), D57-AC3 (SEQ ID NO:1977), D57-AC6 (SEQ ID NO:1978), D57-AC9 (SEQ ID NO:1979), and D57-AC11 (SEQ ID NO:1980).

[0574] FIG. 173-256 is the nucleic acid sequence of D57-AD3 (SEQ ID NO:1981), D57-AE4 (SEQ ID NO:1982), D57-AE6 (SEQ ID NO:1983), D57-AE9 (SEQ ID NO:1984), and D57-AF4 (SEQ ID NO:1985).

[0575] FIG. 173-257 is the nucleic acid sequence of D57-AF11 (SEQ ID NO:1986), D57-AG3 (SEQ ID NO:1987), D57-AH11 (SEQ ID NO:1988), D58-AB2 (SEQ ID NO:1989), D58-AC8 (SEQ ID NO:1990), and D58-AG9 (SEQ ID NO:1991).

[0576] FIG. 173-258 is the nucleic acid sequence of D58-BA9 (SEQ ID NO:1992), D58-BB9 (SEQ ID NO:1993), D58-BC1 (SEQ ID NO:1994), D58-BC10 (SEQ ID NO:1995), D58-BC11 (SEQ ID NO:1996), and D58-BD4 (SEQ ID NO:1997).

[0577] FIG. 173-259 is the nucleic acid sequence of D58-BE8 (SEQ ID NO:1998), D58-BF4 (SEQ ID NO:1999), D60-AB4 (SEQ ID NO:2000), D60-AC4 (SEQ ID NO:2001), D60-AD11 (SEQ ID NO:2002), and D60-AF9 (SEQ ID NO:2003).

[0578] FIG. 173-260 is the nucleic acid sequence of D65-AB6 (SEQ ID NO:2004), D65-AC3 (SEQ ID NO:2005), D65-AC9 (SEQ ID NO:2006), D65-AC12 (SEQ ID NO:2007), D65-AE3 (SEQ ID NO:2008), and D65-AG1 (SEQ ID NO:2009).

[0579] FIG. 173-261 is the nucleic acid sequence of D65-CE10 (SEQ ID NO:2010), D65-CE11 (SEQ ID NO:2011), D65-CF11 (SEQ ID NO:2012), D65-CH5 (SEQ ID NO:2013), D66-AA1 (SEQ ID NO:2014), and D66-AA3 (SEQ ID NO:2015).

[0580] FIG. 173-262 is the nucleic acid sequence of D66-AE5 (SEQ ID NO:2016), D66-AF1 (SEQ ID NO:2017), D66-AG2 (SEQ ID NO:2018), D66-AG6 (SEQ ID NO:2019), and D66-AH3 (SEQ ID NO:2020).

[0581] FIG. 173-263 is the nucleic acid sequence of D66-BA11 (SEQ ID NO:2021), D66-BD6 (SEQ ID NO:2022), D66-BD8 (SEQ ID NO:2023), D67-AA5 (SEQ ID NO:2024), D67-AD3 (SEQ ID NO:2025), and D67-AE1 (SEQ ID NO:2026).

[0582] FIG. 173-264 is the nucleic acid sequence of D67-AE4 (SEQ ID NO:2027), D67-AG4 (SEQ ID NO:2028), D68-AF3 (SEQ ID NO:2029), D70A-AE1 (SEQ ID NO:2030), D70A-AG7 (SEQ ID NO:2031), and D70A-BC6 (SEQ ID NO:2032).

[0583] FIG. 173-265 is the nucleic acid sequence of D70A-BF7 (SEQ ID NO:2033), D70A-BF8 (SEQ ID NO:2034), D70A-BH1 (SEQ ID NO:2035), D70A-BH3 (SEQ ID NO:2036), and D73A-AA1 (SEQ ID NO:2037).

[0584] FIG. 173-266 is the nucleic acid sequence of D73A-AA3 (SEQ ID NO:2038), D73A-AA5 (SEQ ID NO:2039), D73A-AA6 (SEQ ID NO:2040), D73A-AA8 (SEQ ID NO:2041), D73A-AA9 (SEQ ID NO:2042), and D73A-AB1 (SEQ ID NO:2043).

[0585] FIG. 173-267 is the nucleic acid sequence of D73A-AB3 (SEQ ID NO:2044), D73A-AB5 (SEQ ID NO:2045), D73A-AB10 (SEQ ID NO:2046), D73A-AC2 (SEQ ID NO:2047), and D73A-AC5 (SEQ ID NO:2048).

[0586] FIG. 173-268 is the nucleic acid sequence of D73A-AC11 (SEQ ID NO:2049), D73A-AC12 (SEQ ID NO:2050), D73A-AD7 (SEQ ID NO:2051), D73A-AD10 (SEQ ID NO:2052), D73A-AE6 (SEQ ID NO:2053), and D73A-AE7 (SEQ ID NO:2054).

[0587] FIG. 173-269 is the nucleic acid sequence of D73A-AE8 (SEQ ID NO:2055), D73A-AE12 (SEQ ID NO:2056), D73A-AF5 (SEQ ID NO:2057), D73A-AF6 (SEQ ID NO:2058), D73A-AF12 (SEQ ID NO:2059), and D73A-AG4 (SEQ ID NO:2060).

[0588] FIG. 173-270 is the nucleic acid sequence of D73A-AG6 (SEQ ID NO:2061), D73A-AG10 (SEQ ID NO:2062), D73A-AH2 (SEQ ID NO:2063), D73A-AH3 (SEQ ID NO:2064), and D73A-AH10 (SEQ ID NO:2065).

[0589] FIG. 173-271 is the nucleic acid sequence of D93-AD3 (SEQ ID NO:2066), D97-AD3 (SEQ ID NO:2067), D97-AE3 (SEQ ID NO:2068), D97-AF1 (SEQ ID NO:2069), and D113-AH8 (SEQ ID NO:2070).

[0590] FIG. 173-272 is the nucleic acid sequence of D114-AA10 (SEQ ID NO:2071), D114-AC11 (SEQ ID NO:2072), D131-AD1 (SEQ ID NO:2073), D133-AD7 (SEQ ID NO:2074), and D139-AD2 (SEQ ID NO:2075).

[0591] FIG. 173-273 is the nucleic acid sequence of D139-AF2 (SEQ ID NO:2076), D144A-AB10 (SEQ ID NO:2077), D144A-AE9 (SEQ ID NO:2078), D144A-AG12 (SEQ ID NO:2079), D145-AC7 (SEQ ID NO:2080), and D145-AH7 (SEQ ID NO:2081).

[0592] FIG. 173-274 is the nucleic acid sequence of D150-AA3 (SEQ ID NO:2082), D150-AG3 (SEQ ID NO:2083), D151-AG3 (SEQ ID NO:2084), D153-AA8 (SEQ ID NO:2085), D153-AB7 (SEQ ID NO:2086), and D153-AC9 (SEQ ID NO:2087).

[0593] FIG. 173-275 is the nucleic acid sequence of D153-AF8 (SEQ ID NO:2088), D155-AA2 (SEQ ID NO:2089), D155-AG2 (SEQ ID NO:2090), D156-AH3 (SEQ ID NO:2091), D159-AA2 (SEQ ID NO:2092), and D164-AD1 (SEQ ID NO:2093).

[0594] FIG. 173-276 is the nucleic acid sequence of D181-AG6 (SEQ ID NO:2094), D182-AB1 (SEQ ID NO:2095), D182-AF2 (SEQ ID NO:2096), D185-AE10 (SEQ ID NO:2097), D186-AH3 (SEQ ID NO:2098), and D188-AC6 (SEQ ID NO:2099).

[0595] FIG. 173-277 is the nucleic acid sequence of D188-AF5 (SEQ ID NO:2100), D189-AD12 (SEQ ID NO:2101), D258-AG6 (SEQ ID NO:2102), D194-AA3 (SEQ ID NO:2103), D194-AB3 (SEQ ID NO:2104), D198-AD9 (SEQ ID NO:2105), and D198-AE9 (SEQ ID NO:2106).

[0596] FIG. 173-278 is the nucleic acid sequence of D203-BB11 (SEQ ID NO:2107), D203-BC11 (SEQ ID NO:2108), D204-AA3 (SEQ ID NO:2109), D204-AF2 (SEQ ID NO:2110), D206-CB1 (SEQ ID NO:2111), and D214-AB1 (SEQ ID NO:2112).

[0597] FIG. 173-279 is the nucleic acid sequence of D214-AF2 (SEQ ID NO:2113), D216-AA7 (SEQ ID NO:2114), D216-AD7 (SEQ ID NO:2115), D219-BA2 (SEQ ID NO:2116), D219-BF1 (SEQ ID NO:2117), and D229-AB2 (SEQ ID NO:2118).

[0598] FIG. 173-280 is the nucleic acid sequence of D230-AD2 (SEQ ID NO:2119), D230-AE2 (SEQ ID NO:2120), D234-AE12 (SEQ ID NO:2121), D241-BG10 (SEQ ID NO:2122), D249-AA9 (SEQ ID NO:2123), and D255-AC5 (SEQ ID NO:2124).

[0599] FIG. 173-281 is the nucleic acid sequence of D270-AE7 (SEQ ID NO:2125), D270-AE8 (SEQ ID NO:2126), D276-AH5 (SEQ ID NO:2127), D279-AA2 (SEQ ID NO:2128), and D279-AB3 (SEQ ID NO:2129).

[0600] FIG. 173-282 is the nucleic acid sequence of D279-AC2 (SEQ ID NO:2130), D279-AC3 (SEQ ID NO:2131), D279-AD3 (SEQ ID NO:2132), and D279-AE2 (SEQ ID NO:2133).

[0601] FIG. 173-283 is the nucleic acid sequence of D279-AG2 (SEQ ID NO:2134), D279-AH3 (SEQ ID NO:2135), D280-BF6 (SEQ ID NO:2136), D281-AB8 (SEQ ID NO:2137), and D281-AC7 (SEQ ID NO:2138).

[0602] FIG. 173-284 is the nucleic acid sequence of D282-AG10 (SEQ ID NO:2139), D288-AC2 (SEQ ID NO:2140), D289-AC6 (SEQ ID NO:2141), D290-AB8 (SEQ ID NO:2142), and D291-AD10 (SEQ ID NO:2143).

[0603] FIG. 173-285 is the nucleic acid sequence of D291-AE11 (SEQ ID NO:2144), D291-AH12 (SEQ ID NO:2145), D292-AB3 (SEQ ID NO:2146), D292-AD3 (SEQ ID NO:2147), D292-AE3 (SEQ ID NO:2148), and D294-AE7 (SEQ ID NO:2149).

[0604] FIG. 173-286 is the nucleic acid sequence of D419-AH11 (SEQ ID NO:2150), D295-AE2 (SEQ ID NO:2151), D295-AG2 (SEQ ID NO:2152), D295-AH2 (SEQ ID NO:2153), D295-AH3 (SEQ ID NO:2154), and D296-AD4 (SEQ ID NO:2155).

[0605] FIG. 173-287 is the nucleic acid sequence of D296-AF4 (SEQ ID NO:2156), D296-AG6 (SEQ ID NO:2157), D297-AD7 (SEQ ID NO:2158), D297-AG7 (SEQ ID NO:2159), and D298-AD11 (SEQ ID NO:2160).

[0606] FIG. 173-288 is the nucleic acid sequence of D418-AH9 (SEQ ID NO:2161), D418-AG10 (SEQ ID NO:2162), D416-AA6 (SEQ ID NO:2163), D414-AA2 (SEQ ID NO:2164), and D269-AD5 (SEQ ID NO:2165).

[0607] FIG. 173-289 is the nucleic acid sequence of D268-AE1 (SEQ ID NO:2166), D258-AF6 (SEQ ID NO:2167), D256-AG9 (SEQ ID NO:2168), D255-AH6 (SEQ ID NO:2169), and D255-AE5 (SEQ ID NO:2170).

[0608] FIG. 173-290 is the nucleic acid sequence of D419-AE11 (SEQ ID NO:2171), D142-AA10 (SEQ ID NO:2172), D140-AH4 (SEQ ID NO:2173), D66-AF7 (SEQ ID NO:2174), and D66-AA7 (SEQ ID NO:2175).

[0609] FIG. 173-291 is the nucleic acid sequence of D65-AF9 (SEQ ID NO:2176), D65-AB3 (SEQ ID NO:2177), D65-AB2 (SEQ ID NO:2178), D144A-AA12 (SEQ ID NO:2179), and D64-7 (SEQ ID NO:2180).

[0610] FIG. 173-292 is the nucleic acid sequence of D109-BF9 (SEQ ID NO:2181), D109-BG9 (SEQ ID NO:2182), D118-AA11 (SEQ ID NO:2183), D142-AB11(5′) (SEQ ID NO:2184), and D142-AE10(5′) (SEQ ID NO:2185).

[0611] FIG. 173-293 is the nucleic acid sequence of D207-AH5 (SEQ ID NO:2186), D231-AA1(5′) (SEQ ID NO:2187), D232-AD4(5′) (SEQ ID NO:2188), D232-AE6(5′) (SEQ ID NO:2189), and D288-AA3 (SEQ ID NO:2190).

[0612] FIG. 173-294 is the nucleic acid sequence of D289-AE6 (SEQ ID NO:2191), D290-AC7 (SEQ ID NO:2192), D58-AA2 (SEQ ID NO:2193),

### DETAILED DESCRIPTION

[0613] Traditionally, numerous steps were involved in the development of any novel, desirable plant germplasm. Plant breeding begins with the analysis and definition of problems and weaknesses of the current germplasm, the establishment of program goals, and the definition of specific breeding objectives. The next step is selection of germplasm that possess the traits to meet the program goals. The goal is to combine in a single variety an improved combination of desirable traits from the parental germplasm. Desirable traits include, for example, higher seed yield, resistance to diseases and insects, tolerance to drought and heat, and better agronomic qualities. However, these processes, which lead to the final step of marketing and distribution, can take six to twelve years from the time the first cross is made. Accordingly, development of new varieties is a time-consuming process that requires precise forward planning, efficient use of resources, and a minimum of changes in direction.

[0614] Improvement of plant varieties through genetic transformation has become increasingly important for modern plant breeding. Genes of potential commercial interest, such as genes conferring specific, desired plant traits of disease resistance, insect resistance, or improved quality, may be incorporated into crop species through various gene transfer technologies. The ability to manipulate gene expression provides a means of producing new characteristics in transformed plants. In some situations high or increased levels of gene expression may be desired. For example, it is desirable to increase production of a protein that itself maximizes the disease resistance, yield, flavor, or any other commercially desirable attribute of a plant. Similarly, the regulation of endogenous gene expression by, for example, gene silencing may result in more valuable plants or plant products.

[0615] During tobacco ripening or curing, the activation, up-regulation, or down-regulation of any of the genes identified as ethylene-induced or senescence-related (e.g., those having the sequence of SEQ ID NOS:4, 40, 44, 52, 54, 60, 70, 104, 138, 140, 158, 162, 188, 212, 226, 234, and 288) may affect those metabolic pathways involved in the formation of numerous secondary metabolites including terpenoids, polyphenols, alkaloids, etc. that affect end-product quality traits (e.g., disease resistance, insect resistance, improved quality, modified aroma, modified flavor, and the like). Similarly affected by the genes identified herein may be the metabolic pathways associated with the rate and type of dry matter accumulated during senescence or the partitioning of dry matter within the plant during senescence. Changes in the rate and type of starch accumulation, lignin formation, cellulose deposition, and sugar translocation could be demonstrated. The control of genes identified herein may also affect those metabolic pathways involved in determining senescence rates, the uniformity of senescence within a leaf and among leaves of a single plant, and the induction of senescence by artificial or natural means. The senescence inducing agents or activities that stimulate or activate the genes identified herein include, for example, chemicals such as dilute peroxides, pesticides, herbicides, growth regulators, heat treatments, wounding, or gases such as ozone and elevated concentrations of carbon dioxide.

[0616] Identifying Tobacco Constitutively Expressed, or Ethylene or Senescence Induced Sequences

[0617] In accordance with the present invention, RNA was extracted from Nicotiana tissue of converter and non-converter Nicotiana lines. The extracted RNA was then used to create cDNA. Nucleic acid sequences of the present invention were then generated using two strategies.

[0618] In the first strategy, the poly A enriched RNA was extracted from plant tissue and cDNA was made by reverse transcription PCR. The single strand cDNA was then used to create p450 specific PCR populations using degenerate primers plus a oligo d(T) reverse primer. The primer design was based on the highly conserved motifs of other plant cytochrome p450 gene sequences. Examples of specific degenerate primers are set forth in FIG. 1 of the U.S. 2004/0103449 A1, U.S. 2004/0111759 A1, and U.S. 2004/0117869 A1 patent application publications, which are hereby incorporated by reference. The sequence of fragments from plasmids containing appropriate size inserts was further analyzed. These size inserts typically ranged from about 300 to about 800 nucleotides depending on which primers were used.

[0619] In a second strategy, a cDNA library was initially constructed. The cDNA in the plasmids was used to create p450 specific PCR populations using degenerate primers plus T7 primer on plasmid as reverse primer. As in the first strategy, the sequence of fragments from plasmids containing appropriate size inserts was further analyzed.

[0620] Nicotiana plant lines known to produce high levels of nornicotine (converter) and plant lines having low levels of nornicotine may be used as starting materials. Leaves can then be removed from plants and treated with ethylene to activate p450 enzymatic activities defined herein. Total RNA is extracted using techniques known in the art. cDNA fragments can then be generated using PCR (RT-PCR) with the oligo d(T) primer (SEQ ID NO:2260) as described in FIG. 161. The cDNA library can then be constructed as more fully described in examples herein.

[0621] The conserved region of p450 type enzymes was used as a template for degenerate primers, examples of which are shown in FIG. 161. Using degenerate primers, p450 specific bands were amplified by PCR. Bands indicative for p450-like enzymes were identified by DNA sequencing. PCR fragments were characterized using BLAST search, alignment or other tools to identify appropriate candidates.

[0622] Sequence information from identified fragments was used to develop PCR primers. These primers in combination with plasmid primers in cDNA library were used to clone full-length p450 genes. Large-scale Southern reverse analysis was conducted to examine the differential expression for all fragment clones obtained and in some cases full-length clones. In this aspect of the invention, these large-scale reverse Southern assays can be conducted using labeled total cDNAs from different tissues as a probe to hybridize with cloned DNA fragments in order to screen all cloned inserts. Nonradioactive and radioactive (P³²) Northern blotting assays were also used to characterize cloned p450 fragments and full-length clones.

[0623] Once plant cells expressing the desired level of p450 enzyme are obtained, plant tissues and whole plants can be regenerated therefrom using methods and techniques well-known in the art. The regenerated plants are then reproduced by conventional means and the introduced genes can be transferred to other strains and cultivars by conventional plant breeding techniques.

[0624] Ethylene-induced or senescence-related genes, for example, those identified in SEQ ID NOS:4, 40, 44, 52, 54, 60, 70, 104, 138, 140, 158, 162, 188, 212, 226, 234, and 288, may encode enzymes that are important determinants of tobacco leaf quality parameters important for a variety of tobacco products. The tobacco products include moist or dry snuff, chewing tobaccos, cigarettes, cigars, cigarillos, pipe tobaccos, bidis, and similar smoking products. The leaf quality parameters may include: visual attributes such as color, surface uniformity, texture, or variegation; structural or physical characteristics as exemplified by lamina-to-stem ratio, oiliness, cigarette filling potential, bulk density, moisture retention, and pliability; chemical or biochemical traits related to flavor, aroma, fermentation capability, burn rates, burn temperatures, artificial flavor absorption and release; and generation of smoke constituents including tar or particulate matter, alkaloids, and other similar attributes. The enzymatic reactions resulting from these ethylene-induced or senescence-related genes may also produce secondary metabolites influencing pathogen or insect interactions that affect tobacco leaf yield and quality. For example, Wagner, et al. (Nature Biotechnology, 19:371-374, 2001) showed that suppression of a p450 hydroxylase gene greatly increases the accumulation of cembratiene-ol, a secondary metabolite influencing aphid resistance.

[0625] Generation of Antibodies

[0626] Peptide specific antibodies were made by deriving their amino acid sequence and selecting peptide regions that were antigenic and unique relative to other clones. Rabbit antibodies were made to synthetic peptides conjugated to a carrier protein. Western blotting analyses or other immunological methods were performed on plant tissue using these antibodies. In addition, peptide specific antibodies were made for several full-length clones by deriving their amino acid sequence and selecting peptide regions that were potentially antigenic and were unique relative to other clones. Rabbit antibodies were made to synthetic peptides conjugated to a carrier protein. Western blotting analyses were performed using these antibodies.

[0627] Downregulating Gene Expression and Altering Enzymatic Activity

[0628] Plants having decreased expression of a polypeptide are generated according to standard gene silencing methods. (For reviews, see Arndt and Rank, Genome 40:785-797, 1997; Turner and Schuch, Journal of Chemical Technology and Biotechnology 75:869-882, 2000; and Klink and Wolniak, Journal of Plant Growth Regulation 19(4):371-384, 2000.) In particular, tobacco nicotine demethylase nucleic acid sequences (e.g., SEQ ID NOS:4, 5, 7, 8, and 9, or fragments thereof such as the sequence of SEQ ID NOS:1 and 62), as well as substantially identical nucleic acid sequences (e.g., the sequence of SEQ ID NO:188) can be used to alter tobacco phenotypes or tobacco metabolites, for example, nornicotine in any Nicotiana species. Decreased expression of a tobacco nicotine demethylase gene may be achieved using, for example, RNA interference (RNAi) (Smith et al., Nature 407:319-320, 2000; Fire et al., Nature 391:306-311, 1998; Waterhouse et al., PNAS 95:13959-13964, 1998; Stalberg et al., Plant Molecular Biology 23:671-683, 1993; Brignetti et al., EMBO J. 17:6739-6746, 1998; Allen et al., Nature Biotechnology 22: 1559-1566, 2004); virus-induced gene silencing (“VIGS”) (Baulcombe, Current Opinions in Plant Biology, 2:109-113, 1999; Cogoni and Macino, Genes Dev 10: 638-643, 2000; Ngelbrecht et al., PNAS 91:10502-10506, 1994); silencing the target gene by transferring a plant endogenous gene in the sense orientation (Jorgensen et al., Plant Mol Biol 31:957-973, 1996); expression of antisense gene; homologous recombination (Ohl et al., Homologous Recombination and Gene Silencing in Plants. Kluwer, Dordrecht, The Netherlands, 1994); Cre/lox systems (Qin et al., PNAS 91: 1706-1710, 1994; Koshinsky et al., The Plant Journal 23: 715-722, 2000; Chou, et al., Plant and Animal Genome VII Conference Abstracts. San Diego, Calif., 17-21 Jan., 1999); gene trapping and T-DNA tagging (Bums et al., Genes Dev. 8: 1087-1105, 1994; Spradling, et al., PNAS 92:10824-10830, 1995; Skarnes et al., Bio/Technology 8, 827-831, 1990; Sundaresan, et al., Genes Dev. 9: 1797-1810, 1995); and any of the other possible gene silencing systems that are available in the science areas that result in the downregulation of expression of a tobacco polypeptide or in a reduction in its enzymatic activity. As further provided herein, any of the nucleic acid sequences provided herein may be down regulated or up regulated using techniques described herein and other technologies found in the art. Exemplary methods are described in more detail below.

[0629] RNA Interference

[0630] RNA interference (“RNAi”) is a generally applicable process for inducing potent and specific post-translational gene silencing in many organisms including plants (see, e.g., Bosher et al., Nat. Cell Biol. 2:E31-36, 2000; and Tavernarakis et al., Nat. Genetics 24:180-183, 2000). RNAi involves introduction of RNA with partial or fully double-stranded character into the cell or into the extracellular environment. Inhibition is specific in that a nucleotide sequence from a portion of the target gene (e.g., a tobacco nicotine demethylase) is chosen to produce inhibitory RNA. The chosen portion generally encompasses exons of the target gene, but the chosen portion may also include untranslated regions (UTRs), as well as introns (e.g., the sequence of SEQ ID NO:7, or a nucleic acid sequence from a desired plant gene, such as any nucleic acid sequence shown in FIGS. 1, 3 to 7, 10 to 158, 162 to 170, 172-1 to 172-19, and 173-1 to 173-294).

[0631] For example, to construct transformation vectors that produce RNAs capable of duplex formation, two nucleic acid sequences, one in the sense and the other in the antisense orientation, may be operably linked, and placed under the control of a strong viral promoter, such as CaMV 35S or the promoter isolated from cassava brown streak virus (CBSV). However, use of the endogenous promoter, such as the nicotine demethylase promoter having the sequence of SEQ ID NO:8, or a fragment thereof that drives transcription, may also be desirable. The length of the tobacco nicotine demethylase nucleic acid sequences included in such a construct is desirably at least 25 nucleotides, but may encompass a sequence that includes up to the full-length tobacco nicotine demethylase gene.

[0632] Constructs that produce RNAs capable of duplex formation may be introduced into the genome of a plant, such as a tobacco plant, by Agrobacterium-mediated transformation (Chuang et al., Proc. Natl. Acad. Sci. USA 97:4985-4990, 2000), causing specific and heritable genetic interference in a tobacco nicotine demethylase. The double-stranded RNA may also be directly introduced into the cell (i.e., intracellularly) or introduced extracellularly, for example, by bathing a seed, seedling, or plant in a solution containing the double-stranded RNA.

[0633] Depending on the dose of double-stranded RNA material delivered, the RNAi may provide partial or complete loss of function for the target gene. A reduction or loss of gene expression in at least 99% of targeted cells may be obtained. In general, lower doses of injected material and longer times after administration of dsRNA result in inhibition in a smaller fraction of cells.

[0634] The RNA used in RNAi may comprise one or more strands of polymerized ribonucleotide; it may include modifications to either the phosphate-sugar backbone or the nucleoside. The double-stranded structure may be formed by a single self-complementary RNA strand or by two complementary RNA strands and RNA duplex formation may be initiated either inside or outside the cell. The RNA may be introduced in an amount which allows delivery of at least one copy per cell. However, higher doses (e.g., at least 5, 10, 100, 500 or 1000 copies per cell) of double-stranded material may yield more effective inhibition. Inhibition is sequence-specific in that nucleotide sequences corresponding to the duplex region of the RNA are targeted for genetic inhibition. RNA containing a nucleotide sequences identical to a portion of the target gene is preferred for inhibition. RNA sequences with insertions, deletions, and single point mutations relative to the target sequence may also be effective for inhibition. Thus, sequence identity may be optimized by alignment algorithms known in the art and calculating the percent difference between the nucleotide sequences. Alternatively, the duplex region of the RNA may be defined functionally as a nucleotide sequence that is capable of hybridizing with a portion of the target gene transcript.

[0635] In addition, the RNA used for RNAi may be synthesized either in vivo or in vitro. For example, endogenous RNA polymerase in the cell may mediate transcription in vivo, or cloned RNA polymerase can be used for transcription in vivo or in vitro. For transcription from a transgene in vivo or an expression construct, a regulatory region may be used to transcribe the RNA strand (or strands).

[0636] Triple Strand Interference

[0637] Endogenous tobacco nicotine demethylase gene expression or expression of a nucleic acid fragment from a desired plant gene, such as any nucleic acid sequence shown in FIGS. 1, 3 to 7, 10 to 158, 162 to 170, 172-1 to 172-19, and 173-1 to 173-294, may also be dow by targeting deoxyribonucleotide sequences complementary to the regulatory region of a tobacco gene (e.g., promoter or enhancer regions) to form triple helical structures that prevent transcription of the tobacco gene in target cells. (See generally, Helene, Anticancer Drug Des. 6:569-584, 1991; Helene et al., Ann. N.Y. Acad. Sci. 660:27-36, 1992; and Maher, Bioassays 14:807-815, 1992.)

[0638] Nucleic acid molecules used in triple helix formation for the inhibition of transcription are preferably single stranded and composed of deoxyribonucleotides. The base composition of these oligonucleotides should promote triple helix formation via Hoogsteen base pairing rules, which generally require sizable stretches of either purines or pyrimidines to be present on one strand of a duplex. Nucleotide sequences may be pyrimidine-based, which will result in TAT and CGC triplets across the three associated strands of the resulting triple helix. The pyrimidine-rich molecules provide base complementarity to a purine-rich region of a single strand of the duplex in a parallel orientation to that strand. In addition, nucleic acid molecules may be chosen that are purine-rich, for example, containing a stretch of G residues. These molecules will form a triple helix with a DNA duplex that is rich in GC pairs, in which the majority of the purine residues are located on a single strand of the targeted duplex, resulting in CGC triplets across the three strands in the triplex.

[0639] Alternatively, the potential sequences that can be targeted for triple helix formation may be increased by creating a “switchback” nucleic acid molecule. Switchback molecules are synthesized in an alternating 5′-3′, 3′-5′ manner, such that they base pair with first one strand of a duplex and then the other, eliminating the necessity for a sizable stretch of either purines or pyrimidines to be present on one strand of a duplex.

[0640] Ribozymes

[0641] Ribozymes are RNA molecules that act as enzymes and can be engineered to cleave other RNA molecules. A ribozyme may be designed to specifically pair with virtually any target RNA and cleave the phosphodiester backbone at a specific location, thereby functionally inactivating the target RNA. The ribozyme itself is not consumed in this process and can act catalytically to cleave multiple copies of mRNA target molecules. Accordingly, ribozymes may also be used as a means to downregulate expression of a tobacco nicotine demethylase. The design and use of target RNA-specific ribozymes is described in Haseloff et al. (Nature 334:585-591, 1988). Preferably, the ribozyme includes at least about 20 continuous nucleotides complementary to the target sequence (e.g., a tobacco nicotine demethylase or a nucleic acid fragment from a desired plant gene, such as any nucleic acid sequence shown in FIGS. 1, 3 to 7, 10 to 158, 162 to 170, 172-1 to 172-19, and 173-1 to 173-294) on each side of the active site of the ribozyme.

[0642] In addition, ribozyme sequences may also be included within an antisense RNA to confer RNA-cleaving activity upon the antisense RNA and, thereby, increasing the effectiveness of the antisense construct.

[0643] Homologous Recombination

[0644] Gene replacement technology is another desirable method for downregulating expression of a given gene. Gene replacement technology is based upon homologous recombination (see, Schnable et al., Curr. Opinions Plant Biol. 1:123-129, 1998). The nucleic acid sequence of the enzyme of interest such as a tobacco nicotine demethylase or a polypeptide encoded by any nucleic acid sequence shown in FIGS. 1, 3 to 7, 10 to 158, 162 to 170, 172-1 to 172-19, and 173-1 to 173-294 can be manipulated by mutagenesis (e.g., insertions, deletions, duplications or replacements) to decrease enzymatic function. The altered sequence can then be introduced into the genome to replace the existing, e.g., wild-type, gene via homologous recombination (Puchta et al., Proc. Natl. Acad. Sci. USA 93:5055-5060, 1996; and Kempin et al., Nature 389: 802-803, 1997). Alternatively, an endogenous tobacco nicotine demethylase gene may be replaced with a gene that does not have demethylase activity, for example, the sequence of SEQ ID NO:188.

[0645] Co-Suppression

[0646] A further desirable method of silencing gene expression is co-suppression (also referred to as sense suppression). This technique, which involves introduction of a nucleic acid, e.g., a nucleic acid fragment from a desired plant gene, such as any nucleic acid sequence shown in FIGS. 1, 3 to 7, 10 to 158, 162 to 170, 172-1 to 172-19, and 173-1 to 173-294, configured in the sense orientation, has been shown to effectively block the transcription of target genes (see, for example, Napoli et al., Plant Cell, 2:279-289, 1990 and Jorgensen et al., U.S. Pat. No. 5,034,323).

[0647] Generally, sense suppression involves transcription of the introduced sequence. However, co-suppression may also occur where the introduced sequence contains no coding sequence per se, but only intron or untranslated sequences or other such sequences substantially identical to sequences present in the primary transcript of the endogenous gene to be repressed. The introduced sequence generally will be substantially identical to the endogenous gene targeted for repression. Such identity is typically greater than about 50%, but higher identities (for example, 80% or even 95%) are preferred because they result in more effective repression. The effect of co-suppression may also be applied to other proteins within a similar family of genes exhibiting homology or substantial homology. Segments from a gene from one plant can be used directly, for example, to inhibit expression of homologous genes in different plant species.

[0648] In sense suppression, the introduced sequence, requiring less than absolute identity, need not be full length, relative to either the primary transcription product or to fully processed mRNA. A higher degree of sequence identity in a shorter than full-length sequence compensates for a longer sequence of lesser identity. Furthermore, the introduced sequence need not have the same intron or exon pattern, and identity of non-coding segments may be equally effective. Sequences of at least 50 base pairs are preferred, with introduced sequences of greater length being more preferred (see, for example, those methods described by Jorgensen et al., U.S. Pat. No. 5,034,323).

[0649] Antisense Suppression

[0650] In antisense technology, a nucleic acid segment from the desired plant gene, such as any nucleic acid sequence shown in FIGS. 1, 3 to 7, 10 to 158, 162 to 170, 172-1 to 172-19, and 173-1 to 173-294, is cloned and operably linked to an expression control region such that the antisense strand of RNA is synthesized. The construct is then transformed into plants and the antisense strand of RNA is produced. In plant cells, it has been shown that antisense RNA inhibits gene expression.

[0651] The nucleic acid segment to be introduced in antisense suppression is generally substantially identical to at least a portion of the endogenous gene or genes to be repressed, but need not be identical. The nucleic acid sequences of the tobacco nicotine demethylase disclosed herein may be included in vectors designed such that the inhibitory effect applies to other proteins within a family of genes exhibiting homology or substantial homology to the target gene. Segments from a gene from one plant can be used, for example, directly to inhibit expression of homologous genes in different tobacco varieties.

[0652] The introduced sequence also need not be full length relative to either the primary transcription product or to fully processed mRNA. Generally, higher homology can be used to compensate for the use of a shorter sequence. Moreover, the introduced sequence need not have the same intron or exon pattern, and homology of non-coding segments will be equally effective. In general, such an antisense sequence will usually be at least 15 base pairs, preferably about 15-200 base pairs, and more preferably 200-2,000 base pairs in length or greater. The antisense sequence may be complementary to all or a portion of the gene to be suppressed, and, as appreciated by those skilled in the art, the particular site or sites to which the antisense sequence binds as well as the length of the antisense sequence will vary, depending upon the degree of inhibition desired and the uniqueness of the antisense sequence. A transcriptional construct expressing a plant negative regulator antisense nucleotide sequence includes, in the direction of transcription, a promoter, the sequence coding for the antisense RNA on the sense strand, and a transcriptional termination region. Antisense sequences may be constructed and expressed as described, for example, in van der Krol et al. (Gene 72: 45-50, 1988); Rodermel et al. (Cell 55: 673-681, 1988); Mol et al. (FEBS Lett. 268: 427-430, 1990); Weigel and Nilsson (Nature 377: 495-500, 1995); Cheung et al., (Cell 82: 383-393, 1995); and Shewmaker et al. (U.S. Pat. No. 5,107,065).

[0653] Dominant Negatives

[0654] Transgenic plants expressing a transgene encoding a dominant negative gene product of a tobacco gene product may be assayed in artificial environments or in the field to demonstrate that the transgene confers downregulates a tobacco gene product in the transgenic plant. Dominant negative transgenes are constructed according to methods known in the art. Typically, a dominant negative gene encodes a mutant negative regulator polypeptide of a tobacco gene product which, when overexpressed, disrupts the activity of the wild-type enzyme.

[0655] Mutants

[0656] Plants having decreased expression or enzymatic activity of a tobacco gene product may also be generated using standard mutagenesis methodologies. Such mutagenesis methods include, without limitation, treatment of seeds with ethyl methylsulfate (Hildering and Verkerk, In, The use of induced mutations in plant breeding. Pergamon press, pp 317-320, 1965) or UV-irradiation, X-rays, and fast neutron irradiation (see, for example, Verkerk, Neth. J. Agric. Sci. 19:197-203, 1971; and Poehlman, Breeding Field Crops, Van Nostrand Reinhold, New York (3.sup.rd ed), 1987), use of transposons (Fedoroff et al., 1984; U.S. Pat. No. 4,732,856 and U.S. Pat. No. 5,013,658), as well as T-DNA insertion methodologies (Hoekema et al., 1983; U.S. Pat. No. 5,149,645). The types of mutations that may be present in a tobacco gene include, for example, point mutations, deletions, insertions, duplications, and inversions. Such mutations desirably are present in the coding region of a tobacco gene; however mutations in the promoter region, and intron, or an untranslated region of a tobacco gene may also be desirable.

[0657] For instance, T-DNA insertional mutagenesis may be used to generate insertional mutations in a tobacco gene to downregulate the expression of the gene. Theoretically, about 100,000 independent T-DNA insertions are required for a 95% probability of getting an insertion in any given gene (McKinnet, Plant J. 8: 613-622, 1995; and Forsthoefel et al., Aust. J. Plant Physiol. 19:353-366, 1992). T-DNA tagged lines of plants may be screened using polymerase chain reaction (PCR) analysis. For example, a primer can be designed for one end of the T-DNA and another primer can be designed for the gene of interest and both primers can be used in the PCR analysis. If no PCR product is obtained, then there is no insertion in the gene of interest. In contrast, if a PCR product is obtained, then there is an insertion in the gene of interest.

[0658] Expression of a mutated tobacco gene product may be evaluated according to standard procedures (for example, those described herein) and, optionally, may be compared to expression of the non-mutated enzyme. When compared to non-mutated plants, mutated plants having decreased expression of a gene encoding a tobacco gene product are desirable embodiments of the present invention. A plant having a mutation in any of the nucleic acid sequences described herein may be used in a breeding program as described herein.

[0659] Overexpression of Constitutive, or Ethylene or Senescence Induced Sequences

[0660] Overexpression of a nucleic acid sequence of the invention (e.g., a nucleic acid sequence shown in FIG. 1, FIGS. 3 to 7, FIGS. 10 to 158, FIGS. 162 to 170, FIGS. 172-1 to 172-19, and FIGS. 173-1 to 173-294, or fragments thereof) can be used to increase desirable traits in the Nicotiana line or in a tobacco product made from a plant of that line. In particular, overexpression of the nucleic acid sequences of the invention, and/or their translation products, may be used to increase the biosynthesis of desirable flavor and aroma products that result from secondary metabolites. Further overexpression of a nucleic acid sequence that encodes a tobacco polypeptide may be used to increase expression of the polypeptide within Nicotiana lines

[0661] Additional desirable traits that may be conferred to a Nicotiana line by overexpressing a nucleic acid sequence of the invention include resistance to bacterial wilt, Granville wilt, Fusarium wilt, potato virus Y, tobacco mosaic virus, tobacco etch virus, tobacco vein mottling virus, alfalfa mosaic viruses, wildfire, root-knot nematode, Southern root knot nematode, cyst nematode, black root rot, blue mold, race 0 black shank fungus, and race 1 black shank fungus. Other desirable traits that may be enhanced in a Nicotiana plant by overxpressing a nucleic acid sequence of the invention include increased yield and/or grade, better curability, harvestability, holding ability, leaf quality, or curing quality, increased or reduced height, altered time of maturity (e.g., early maturing, early to medium maturing, medium maturing, medium to late maturing, or late maturing), increased or reduced stalk size, and an increase or reduction in the number of leaves per plant.

[0662] Plant Promoters

[0663] A desirable promoter is a caulimovirus promoter, for instance, a cauliflower mosaic virus (CaMV) promoter or the cassava vein mosaic virus (CsVMV) promoter. These promoters confer high levels of expression in most plant tissues, and the activity of these promoters is not dependent on virally encoded proteins. CaMV is a source for both the 35 S and 19 S promoters. Examples of plant expression constructs using these promoters are known in the art. In most tissues of transgenic plants, the CaMV 35 S promoter is a strong promoter. The CaMV promoter is also highly active in monocots. Moreover, activity of this promoter can be further increased (i.e., between 2-10 fold) by duplication of the CaMV 35S promoter.

[0664] Other useful plant promoters include, without limitation, the nopaline synthase (NOS) promoter, the octopine synthase promoter, figwort mosiac virus (FMV) promoter, the rice actin promoter, and the ubiquitin promoter system.

[0665] Exemplary monocot promoters include, without limitation, commelina yellow mottle virus promoter, sugar cane badna virus promoter, rice tungro bacilliform virus promoter, maize streak virus element, and wheat dwarf virus promoter.

[0666] For certain applications, it may be desirable to produce a tobacco gene product, such as a dominant negative mutant gene product, in an appropriate tissue, at an appropriate level, or at an appropriate developmental time. For this purpose, there are assortments of gene promoters, each with its own distinct characteristics embodied in its regulatory sequences, shown to be regulated in response to inducible signals such as the environment, hormones, and/or developmental cues. These include, without limitation, gene promoters that are responsible for heat-regulated gene expression, light-regulated gene expression (for example, the pea rbcS-3A; the maize rbcS promoter; the chlorophyll a/b-binding protein gene found in pea; or the Arabssu promoter), hormone-regulated gene expression (for example, the abscisic acid (ABA) responsive sequences from the Em gene of wheat; the ABA-inducible HVA1 and HVA22, and rd29A promoters of barley and Arabidopsis; and wound-induced gene expression (for example, of wunI), organ-specific gene expression (for example, of the tuber-specific storage protein gene; the 23-kDa zein gene from maize described by; or the French bean β-phaseolin gene), or pathogen-inducible promoters (for example, the PR-1, prp-1, or β-1,3 glucanase promoters, the fungal-inducible wirla promoter of wheat, and the nematode-inducible promoters, TobRB7-5A and Hmg-1, of tobacco and parsley, respectively).

[0667] Plant Expression Vectors

[0668] Typically, plant expression vectors include (1) a cloned plant gene under the transcriptional control of 5′ and 3′ regulatory sequences and (2) a dominant selectable marker. Such plant expression vectors may also contain, if desired, a promoter regulatory region (for example, one conferring inducible or constitutive, pathogen- or wound-induced, environmentally- or developmentally-regulated, or cell- or tissue-specific expression), a transcription initiation start site, a ribosome binding site, an RNA processing signal, a transcription termination site, and/or a polyadenylation signal.

[0669] Plant expression vectors may also optionally include RNA processing signals, e.g, introns, which have been shown to be important for efficient RNA synthesis and accumulation. The location of the RNA splice sequences can dramatically influence the level of transgene expression in plants. In view of this fact, an intron may be positioned upstream or downstream of a tobacco nicotine demethylase coding sequence in the transgene to alter levels of gene expression.

[0670] In addition to the aforementioned 5′ regulatory control sequences, the expression vectors may also include regulatory control regions which are generally present in the 3′ regions of plant genes. For example, the 3′ terminator region may be included in the expression vector to increase stability of the mRNA. One such terminator region may be derived from the PI-II terminator region of potato. In addition, other commonly used terminators are derived from the octopine or nopaline synthase signals.

[0671] The plant expression vector also typically contains a dominant selectable marker gene used to identify those cells that have become transformed. Useful selectable genes for plant systems include the aminoglycoside phosphotransferase gene of transposon Tn5 (Aph II), genes encoding antibiotic resistance genes, for example, those encoding resistance to hygromycin, kanamycin, bleomycin, neomycin, G418, streptomycin, or spectinomycin. Genes required for photosynthesis may also be used as selectable markers in photosynthetic-deficient strains. Finally, genes encoding herbicide resistance may be used as selectable markers; useful herbicide resistance genes include the bar gene encoding the enzyme phosphinothricin acetyltransferase and conferring resistance to the broad-spectrum herbicide Basta® (Bayer Cropscience Deutschland GmbH, Langenfeld, Germany). Other selectable markers include genes that provide resistance to other such herbicides such as glyphosate and the like, and imidazolinones, sulfonylureas, triazolopyrimidine herbicides, such as chlorosulfron, bromoxynil, dalapon, and the like. Furthermore, genes encoding dihydrofolate reductase may be used in combination with molecules such as methatrexate.

[0672] Efficient use of selectable markers is facilitated by a determination of the susceptibility of a plant cell to a particular selectable agent and a determination of the concentration of this agent which effectively kills most, if not all, of the transformed cells. Some useful concentrations of antibiotics for tobacco transformation include, for example, 20-100 μg/ml (kanamycin), 20-50 μg/ml (hygromycin), or 5-10 μg/ml (bleomycin). A useful strategy for selection of transformants for herbicide resistance is described, for example, by Vasil (Cell Culture and Somatic Cell Genetics of Plants, Vol I, II, III Laboratory Procedures and Their Applications, Academic Press, New York, 1984).

[0673] In addition to a selectable marker, it may be desirable to use a reporter gene. In some instances a reporter gene may be used without a selectable marker. Reporter genes are genes which are typically not present or expressed in the recipient organism or tissue. The reporter gene typically encodes for a protein which provide for some phenotypic change or enzymatic property. Examples of such genes are provided in Weising et al. (Ann. Rev. Genetics 22:421, 1988), which is incorporated herein by reference. Preferred reporter genes include without limitation glucuronidase (GUS) gene and GFP genes.

[0674] Upon construction of the plant expression vector, several standard methods are available for introduction of the vector into a plant host, thereby generating a transgenic plant. These methods include (1) Agrobacterium-mediated transformation (A. tumefaciens or A. rhizogenes) (see, for example, Lichtenstein and Fuller In: Genetic Engineering, vol 6, PWJ Rigby, ed, London, Academic Press, 1987; and Lichtenstein, C. P., and Draper, J., In: DNA Cloning, Vol II, D. M. Glover, ed, Oxford, IRI Press, 1985; U.S. Pat. Nos., 4,693,976, 4,762,785, 4,940,838, 5,004,863, 5,104,310, 5,149,645, 5,159,135, 5,177,010, 5,231,019, 5,463,174, 5,469,976, and 5,464,763; and European Patent Numbers 0131624, 0159418, 0120516,0176112, 0116718, 0290799, 0292435, 0320500, and 0627752, and European Patent Application Numbers 0267159 and 0604622,), (2) the particle delivery system (see, for example, U.S. Pat. Nos. 4,945,050 and 5,141,131), (3) microinjection protocols, (4) polyethylene glycol (PEG) procedures, (5) liposome-mediated DNA uptake, (6) electroporation protocols (see, for example, WO 87/06614 and U.S. Pat. Nos. 5,384,253, 5,472,869, 5,641,664, 5,679,558, 5,712,135, 6,002,070, and 6,074,877, (7) the vortexing method, or (8) the so-called whiskers methodology (see, for example, Coffee et al., U.S. Pat. Nos. 5,302,523 and 5,464,765). The type of plant tissue that may be transformed with an expression vector includes embryonic tissue, callus tissue type I and II, hypocotyls, meristem, and the like.

[0675] Once introduced into the plant tissue, the expression of the structural gene may be assayed by any means known to the art, and expression may be measured as mRNA transcribed, protein synthesized, or the amount of gene silencing that occurs as determined by metabolite monitoring via chemical analysis of secondary alkaloids in tobacco (as described herein; see also U.S. Pat. No. 5,583,021 which is hereby incorporated by reference). Techniques are known for the in vitro culture of plant tissue, and in a number of cases, for regeneration into whole plants (see, e.g., U.S. Pat. Nos. 5,595,733 and 5,766,900). Procedures for transferring the introduced expression complex to commercially useful cultivars are known to those skilled in the art.

[0676] Once plant cells expressing the desired level of a desirable gene product are obtained, plant tissues and whole plants can be regenerated therefrom using methods and techniques well-known in the art. The regenerated plants are then reproduced by conventional means and the introduced genes can be transferred to other strains and cultivars by conventional plant breeding techniques.

[0677] Transgenic tobacco plants may incorporate a nucleic acid of any portion of the genomic gene in different orientations for either down-regulation, for example, antisense orientation, or over-expression, for example, sense orientation. Over-expression of the nucleic acid sequence that encodes the entire or a functional part of an amino acid sequence of a full-length tobacco gene is desirable for increasing the expression of the gene product within Nicotiana lines.

[0678] Determination of Transcriptional or Translational Levels of a Tobacco Gene

[0679] Gene expression may be measured, for example, by standard Northern blot analysis (Ausubel et al., Current Protocols in Molecular Biology, John Wiley & Sons, New York, N.Y., (2001), and Sambrook et al., Molecular Cloning: A Laboratory Manual, Cold Spring Harbor Laboratory, N.Y., (1989)) using a tobacco gene or gene fragment as a hybridization probe. Determination of RNA expression levels may also be aided by reverse transcription PCR (rtPCR), including quantitative rtPCR (see, e.g., Kawasaki et al., in PCR Technology: Principles and Applications of DNA Amplification (H. A. Erlich, Ed.) Stockton Press (1989); Wang et al. in PCR Protocols: A Guide to Methods and Applications (M. A. Innis, et al., Eds.) Academic Press (1990); and Freeman et al., Biotechniques 26:112-122 and 124-125, 1999). Additional well-known techniques for determining expression of a tobacco gene include in situ hybridization, and fluorescent in situ hybridization (see, e.g., Ausubel et al., Current Protocols in Molecular Biology, John Wiley & Sons, New York, N.Y., (2001)). The above standard techniques are also useful to compare the expression level between plants, for example, between a plant having a mutation in a tobacco gene and a control plant.

[0680] If desired, expression of a tobacco gene (e.g., a nucleic acid sequence shown in FIGS. 1, 3 to 7, 10 to 158, 162 to 170, 172-1 to 172-19, and 173-1 to 173-294, or a fragment thereof) may be measured at the level of protein production using the same general approach and standard protein analysis techniques including Bradford assays, spectrophotometric assays, and immunological detection techniques, such as Western blotting or immunoprecipitation with an antibody specific for the desirable polypeptide (Ausubel et al., Current Protocols in Molecular Biology, John Wiley & Sons, New York, N.Y., (2001), and Sambrook et al., Molecular Cloning: A Laboratory Manual, Cold Spring Harbor Laboratory, N.Y., (1989)).

[0681] The activity of any polypeptide described herein may be assayed using standard methods in the art. For example, the activity of a p450 is typically assayed using fluorescent-based assays (see, e.g., Donato et al. Drug Metab Dispos. 32: 699-706, 2004). In particular, the activity of a nicotine demethylase may be assayed as described herein using yeast microsome assays.

Identification of Modulators of a Tobacco Gene Product

[0682] Isolation of a cDNA also facilitates the identification of molecules that increase or decrease expression the gene product. According to one approach, candidate molecules are added at varying concentrations to a culture medium of cells (for example, prokaryotic cells such as E. coli or eukaryotic cells such as yeast, mammalian, insect, or plant cells) expressing a tobacco mRNA. Gene product expression is then measured in the presence and absence of a candidate molecule using standard methods such as those set forth herein.

[0683] Candidate modulators may be purified (or substantially purified) molecules or may be one component of a mixture of compounds. In a mixed compound assay, gene product expression is tested against progressively smaller subsets of the candidate compound pool (for example, produced by standard purification techniques, for example, HPLC) until a single compound or minimal compound mixture is demonstrated to alter tobacco nicotine demethylase gene expression. In one embodiment of the invention, a molecule that promotes a decrease gene product expression is considered particularly desirable. Modulators found to be effective at the level of gene product expression or activity may be confirmed as useful in planta.

[0684] For agricultural uses, the molecules, compounds, or agents identified using the methods disclosed herein may be used as chemicals applied as sprays or dusts on the foliage of plants. The molecules, compounds, or agents may also be applied to plants in combination with another molecule which affords some benefit to the plant.

Uses

[0685] Regulation of the endogenous gene corresponding to any of the sequences described herein by, for example, gene silencing may result in more valuable plants or plant products. In particular, sequences identified herein as ethylene-induced or senescence-related (e.g., those having the sequence of SEQ ID NOS:4, 40, 44, 52, 54, 60, 70, 104, 138, 140, 158, 162, 188, 212, 226, 234, and 288 or a nucleic acid sequence shown in FIGS. 1, 3 to 7, 10 to 158, 162 to 170, 172-1 to 172-19, and 173-1 to 173-294, or a fragment thereof) may be used to affect metabolic pathways involved in the formation of numerous secondary metabolites including terpenoids, polyphenols, alkaloids, etc. that affect end-product quality traits. Similarly the genes identified herein may be used to regulate metabolic pathways associated with the rate and type of dry matter accumulated during senescence or the partitioning of dry matter within the plant during senescence. Regulating the genes identified herein may also be used to affect metabolic pathways involved in determining senescence rates, the uniformity of senescence within a leaf and among leaves of a single plant, and the induction of senescence by agents or activities that stimulate or activate the genes identified herein, and, thereby, control the quality of a product or article of manufacture that includes a leaf or other plant component.

[0686] The promoter region of a gene described herein may be used to drive expression of any desirable gene product to improve crop quality or enhance specific traits. A promoter that is inducible and expressed during a particular period of the plant's life cycle can be used in constructs for introduction into the plant to express unique genes involved in the biosynthesis of flavor and aroma products that result from secondary metabolites. A tobacco gene promoter may also be used to increase or modify the expression of structural carbohydrates or proteins that affect end-use properties. Further, a tobacco gene promoter could be combined with heterologous genes that include genes involved in the biosynthesis of nutritional products, pharmaceutical agents, or industrial materials. Regulation of a promoter sequence may also be used to downregulate endogenous tobacco genes, including genes involved in alkaloid biosynthesis and/or in other pathways. Desirably, a tobacco gene promoter region or other transcriptional regulatory region is used to alter chemical properties such as nornicotine content and nitrosamine levels in a plant. In addition, promoter motifs, which can readily be identified in a promoter sequence using standard methods in the art, may be used to identify factors that associate with or regulate the expression of a tobacco gene product, e.g., a p450.

[0687] Moreover, any of the sequences of the present invention (e.g., the nucleic acid sequences shown in FIG. 1, FIGS. 3 to 7, FIGS. 10 to 158, FIGS. 162 to 170, FIGS. 172-1 to 172-19, and FIGS. 173-1 to 173-294, or fragments thereof) may be used in methods that reduce gene expression or alter enzymatic activity of a gene product, such as a p450, using standard techniques described herein. Such techniques include, without limitation, RNA interference, triple strand interference, ribozymes, homologous recombination, virus-induced gene silencing, antisense and co-suppression technologies, expression of a dominant negative gene product, and the generation of mutated genes using standard mutagenesis techniques. For example, reducing p450 expression or altering p450 enzymatic activity may be used to alter fatty acids that are involved in plant-pathogen interactions and disease resistance or may be used to alter a plant's profile of selected fatty acids and thereby alter the flavor or aroma of the plant or plant component.

[0688] Furthermore, using standard methods, any portion of a tobacco gene, including the promoter, the coding sequence, an intron, or a 3′UTR, or a fragment thereof, can be used as a genetic marker to isolate related genes, promoters or regulatory regions, for screening for the related gene in other tobacco or Nicotiana species, or for determining whether a plant has a mutation in a corresponding endogenous gene. A portion of a tobacco gene may also be used to monitor gene flow through a breeding effort to track intergression or loss of a particular gene.

[0689] For example, Nicotiana tabacum is an allotetraploid, as are several of the other Nicotiana species, and the genetic markers could be used to identify homologous genes or related genes in the parental genome different from the genome in which the original gene resides. A marker for the related gene could be also be used to screen existing tobacco germplasm, segregating or synthetic populations created by hybridizations, populations created from mutagenic treatments or from various tissue culture methods. As such, the nucleic acid sequences described herein (e.g., the nucleic acid sequences shown in FIG. 1, FIGS. 3 to 7, FIGS. 10 to 158, FIGS. 162 to 170, FIGS. 172-1 to 172-19, and FIGS. 173-1 to 173-294, or fragments thereof) may be used to identify or affect genes involved in disease or insect resistance, flavor and aroma properties, herbicide tolerance, quality factors related to undesirable constituents, or that increase leaf yield, or affect leaf or plant components, such as lignins, cellulose, etc., related to structural traits or fiber content.

Products

[0690] Tobacco products having a reduced amount of nitrosamine content are manufactured using any of the tobacco plant material described herein according to standard methods known in the art. In one embodiment, tobacco products are manufactured using tobacco plant material obtained from a cured tobacco plant. The cured tobacco plant may contain or have been bred to contain reduced nicotine demethylase activity. For example, the cured tobacco plant may be a tobacco plant resulting from a cross including a tobacco plant identified as having variant expression of nicotine demethylase. Desirably the tobacco product has a reduced amount of nornicotine or NNN of less than about 5 mg/g, 4.5 mg/g, 4.0 mg/g, 3.5 mg/g, 3.0 mg/g, 2.5 mg/g, 2.0 mg/g, 1.5 mg/g, 1.0 mg/g, 750 μg/g, 500 μg/g, 250 μg/g, 100 μg/g, 75 μg/g, 50 μg/g, 25 μg/g, 10 μg/g, 7.0 μg/g, 5.0 μg/g, 4.0 μg/g, 2.0 μg/g, 1.0 μg/g, 0.5 μg/g, 0.4 μg/g, 0.2 μg/g, 0.1 μg/g, 0.05 μg/g, or 0.01 μg/g or wherein the percentage of secondary alkaloids relative to total alkaloid content contained therein is less than 90%, 70%, 50%, 30%, 10%, 5%, 4%, 3%, 2%, 1.5%, 1%, 0.75%, 0.5%, 0.25%, or 0.1%. The phrase “a reduced amount” refers to an amount of nornicotine or NNN or both in a tobacco plant or plant component or a tobacco product that is less than what would be found in a wild-type tobacco plant or plant component or tobacco product from the same variety of tobacco, processed in the same manner, which was not made transgenic for reduced nornicotine or NNN. In one example, a wild-type tobacco plant of the same variety that has been processed in the same manner is used as a control to measure whether a reduction of nornicotine or NNN or both has been obtained by the methods described herein. In another example, plants having a reduced amount of nitrosamine content are evaluated using standard methods, for instance, by monitoring the presence or absence of a gene or gene product, e.g., a nicotine demethylase, or a particular mutation in a gene. In still another example, nitrosamine content of plants resulting from a breeding program are compared to the nitrosamine content of the recipient line or donor line, or both, used to breed the plant having the reduced amount of nitrosamine. Other suitable controls known in the art are also used as needed. Levels of nornicotine and NNN or both are measured according to methods well known in the tobacco art.

[0691] The following examples illustrate methods for carrying out the invention and should be understood to be illustrative of, but not limiting upon, the scope of the invention which is defined in the appended claims.

### EXAMPLE 1

### Development of Plant Tissue and Ethylene Treatment

Plant Growth

[0692] Plants were seeded in pots and grown in a greenhouse for 4 weeks. The 4-week old seedlings were transplanted into individual pots and grown in the greenhouse for 2 months. The plants were watered 2 times a day with water containing 150 ppm NPK fertilizer during growth. The expanded green leaves were detached from plants to do the ethylene treatment described below.

Cell Line 78379

[0693] Tobacco line 78379, which is a Burley tobacco line released by the University of Kentucky was used as a source of plant material. One hundred plants were cultured as standard in the art of growing tobacco, transplanted, and tagged with a distinctive number (1-100). Fertilization and field management were conducted as recommended.

[0694] Three quarters of the 100 plants converted between 20 and 100% of the nicotine to nornicotine. One quarter of the 100 plants converted less than 5% of the nicotine to nornicotine. Plant number 87 had the least conversion (2%) while plant number 21 had 100% conversion. Plants converting less than 3% were classified as non-converters. Self-pollinated seed of plant number 87 and plant number 21, as well as crossed (21×87 and 87×21) seeds were made to study genetic and phenotypic differences. Plants from selfed 21 were converters, and 99% of selfs from 87 were non-converters. The other 1% of the plants from 87 showed low conversion (5-15%). Plants from reciprocal crosses were all converters.

Cell Line 4407

[0695] Nicotiana line 4407, which is a Burley line, was used as a source of plant material. Uniform and representative plants (100) were selected and tagged. Of the 100 plants 97 were non-converters and three were converters. Plant number 56 had the least amount of conversion (1.2%) and plant number 58 had the highest level of conversion (96%). Self-pollinated seeds and crossed seeds were made with these two plants.

[0696] Plants from selfed-58 segregated with 3:1 converter to non-converter ratio. Plants 58-33 and 58-25 were identified as homozygous converter and nonconverter plant lines, respectively. The stable conversion of 58-33 was confirmed by analysis of its progeny.

Cell Line PBLB01

[0697] PBLB01 is a Burley line developed by ProfiGen, Inc. and was used as a source of plant material. The converter plant was selected from foundation seeds of PBLB01.

Ethylene Treatment Procedures

[0698] Green leaves were detached from 2-3 month greenhouse grown plants and sprayed with 0.3% ethylene solution (Prep brand Ethephon (Rhone-Poulenc)). Each sprayed leaf was hung in a curing rack equipped with humidifier and covered with plastic. During the treatment, the sample leaves were periodically sprayed with the ethylene solution. Approximately 24-48 hour post ethylene treatment, leaves were collected for RNA extraction. Another sub-sample was taken for metabolic constituent analysis to determine the concentration of leaf metabolites and more specific constituents of interest such as a variety of alkaloids.

[0699] As an example, alkaloids analysis could be performed as follows. Samples (0.1 g) were shaken at 150 rpm with 0.5 ml 2N NaOH, and a 5 ml extraction solution which contained quinoline as an internal standard and methyl t-butyl ether. Samples were analyzed on a HP 6890 GC equipped with a FID detector. A temperature of 250° C. was used for the detector and injector. An HP column (30 m-0.32 nm-1 mm) consisting of fused silica crosslinked with 5% phenol and 95% methyl silicon was used at a temperature gradient of 110-185° C. at 10° C. per minute. The column was operated at 100° C. with a flow rate of 1.7 cm³min⁻¹ with a split ratio of 40:1 with a 2:1 injection volume using helium as the carrier gas.

### EXAMPLE 2

### RNA Isolation

[0700] For RNA extractions, middle leaves from two-month old greenhouse grown plants were treated with ethylene as described above. The 0 and 24-48 hours samples were used for RNA extraction. In some cases, leaf samples under the senescence process were taken from the plants 10 days post flower-head removal. These samples were also used for extraction. Total RNA was isolated using Rneasy Plant Mini Kit® (Qiagen, Inc., Valencia, Calif.) according to the manufacturer's protocol.

[0701] The tissue sample was ground under liquid nitrogen to a fine powder using a DEPC treated mortar and pestle. Approximately 100 milligrams of ground tissue were transferred to a sterile 1.5 ml Eppendorf tube. This sample tube was placed in liquid nitrogen until all samples were collected. Then, 450 μl of Buffer RLT as provided in the kit (with the addition of Mercaptoethanol) was added to each individual tube. The sample was vortexed vigorously and incubated at 56° C. for 3 minutes. The lysate was then applied to the QIAshredder® spin column sitting in a 2 ml collection tube, and centrifuged for 2 minutes at maximum speed. The flow through was collected and 0.5 volume of ethanol was added to the cleared lysate. The sample was mixed well and transferred to an Rneasy® mini spin column sitting in a 2 ml collection tube. The sample was centrifuged for 1 minute at 10,000 rpm. Next, 700 μl of buffer RW1 was pipetted onto the Rneasy® column and centrifuged for 1 minute at 10,000 rpm. Buffer RPE was pipetted onto the Rneasy® column in a new collection tube and centrifuged for 1 minute at 10,000 rpm. Buffer RPE was again, added to the Rneasy® spin column and centrifuged for 2 minutes at maximum speed to dry the membrane. To eliminate any ethanol carry over, the membrane was placed in a separate collection tube and centrifuged for an additional 1 minute at maximum speed. The Rneasy® column was transferred into a new 1.5 ml collection tube, and 40 μl of Rnase-free water was pipetted directly onto the Rneasy® membrane. This final elute tube was centrifuged for 1 minute at 10,000 rpm. Quality and quantity of total RNA was analyzed by denatured formaldehyde gel and spectrophotometer.

[0702] Poly(A)RNA was isolated using Oligotex® poly A+ RNA purification kit (Qiagen Inc.) following the manufacturer's protocol. About 200 μg total RNA in 250 μl maximum volume was used. A volume of 250 μl of Buffer OBB and 15 μl of Oligotex® suspension was added to the 250 μl of total RNA. The contents were mixed thoroughly by pipetting and incubated for 3 minutes at 70° C. on a heating block. The sample was then placed at room temperature for approximately 20 minutes. The Oligotex®: mRNA complex was pelleted by centrifugation for 2 minutes at maximum speed. All but 50 μl of the supernatant was removed from the microcentrifuge tube. The sample was treated further by OBB buffer. The Oligotex®: mRNA pellet was resuspended in 400 μl of Buffer OW2 by vortexing. This mix was transferred onto a small spin column placed in a new tube and centrifuged for 1 minute at maximum speed. The spin column was transferred to a new tube and an additional 400 μl of Buffer OW2 was added to the column. The tube was then centrifuged for 1 minute at maximum speed. The spin column was transferred to a final 1.5 ml microcentrifuge tube. The sample was eluted with 60 μl of hot (70° C.) Buffer OEB. Poly A product was analyzed by denatured formaldehyde gels and spectrophotometric analysis.

### EXAMPLE 3

### Reverse-Transcription-PCR

[0703] First strand cDNA was produced using SuperScript reverse transcriptase following the manufacturer's protocol (Invitrogen, Carlsbad, Calif.). The poly A+ enriched RNA/oligo dT primer mix consisted of less than 5 μg of total RNA, 1 μl of 10 mM dNTP mix, 1 μl of Oligo d(T)₁₂₋₁₈ (0.5 μg/μl), and up to 10 μl of DEPC-treated water. Each sample was incubated at 65° C. for 5 minutes, then placed on ice for at least 1 minute. A reaction mixture was prepared by adding each of the following components in order: 2 μl 10× RT buffer, 4 μl of 25 mM MgCl₂, 2 μl of 0.1 M DTT, and 1 μl of RNase OUT Recombinant RNase Inhibitor. An addition of 9 μl of reaction mixture was pipetted to each RNA/primer mixture and gently mixed. It was incubated at 42° C. for 2 minutes and 1 μl of Super Script II RT was added to each tube. The tube was incubated for 50 minutes at 42° C. The reaction was terminated at 70° C. for 15 minutes and chilled on ice. The sample was collected by centrifugation and 1 μl of RNase H was added to each tube and incubated for 20 minutes at 37° C. The second PCR was carried out with 200 pmoles of forward primer and 100 pmoles reverse primer (mix of 18 nt oligo d(T) followed by 1 random base).

[0704] Reaction conditions were 94° C. for 2 minutes and then 40 cycles of PCR at 94° C. for 1 minute, 45° C. to 60° C. for 2 minutes, 72° C. for 3 minutes, with a 72° C. extension for an extra 10 min. Ten microliters of the amplified sample were analyzed by electrophoresis using a 1% agarose gel. The correct size fragments were purified from agarose gel.

### EXAMPLE 4

### Generation of PCR Fragment Populations

[0705] PCR fragments from Example 3 were ligated into a pGEM-T Easy Vector (Promega, Madison, Wis.) following the manufacturer's instructions. The ligated product was transformed into JM109 competent cells and plated on LB media plates for blue/white selection. Colonies were selected and grown in a 96 well plate with 1.2 ml of LB media overnight at 37° C. Frozen stock was generated for all selected colonies. Plasmid DNA was purified from plates using Beckman's Biomeck 2000 miniprep robotics with Wizard SV Miniprep kit (Promega). Plasmid DNA was eluted with 100 μl water and stored in a 96 well plate. Plasmids were digested by EcoR1 and were analyzed using 1% agarose gel to confirm the DNA quantity and size of inserts. Plasmids containing a 400-600 bp insert were sequenced using a CEQ 2000 sequencer (Beckman, Fullerton, Calif.). The sequences were aligned with GenBank database by BLAST search (see, e.g., FIGS. 159A to 159K). The p450 related fragments were identified and further analyzed. Alternatively, p450 fragments were isolated from subtraction libraries. These fragments were also analyzed as described above.

### EXAMPLE 5

### cDNA Library Construction

[0706] A cDNA library was constructed by preparing total RNA from ethylene treated leaves as follows. First, total RNA was extracted from ethylene treated leaves of tobacco line 58-33 using a modified acid phenol and chloroform extraction protocol. The protocol was modified to use one gram of tissue that was ground and subsequently vortexed in 5 ml of extraction buffer (100 mM Tris-HCl, pH 8.5; 200 mM NaCl; 10 mM EDTA; 0.5% SDS) to which 5 ml phenol (pH 5.5) and 5 ml chloroform was added. The extracted sample was centrifuged and the supernatant was saved. This extraction step was repeated 2-3 times until the supernatant appeared clear. Approximately 5 ml of chloroform was added to remove trace amounts of phenol. RNA was precipitated from the combined supernatant fractions by adding a 3-fold volume of ethanol and 1/10 volume of 3M NaOAc (pH 5.2) and storing at −20° C. for 1 hour. After transfer to a Corex glass container the RNA fraction was centrifuged at 9,000 RPM for 45 minutes at 4° C. The pellet was washed with 70% ethanol and spun for 5 minutes at 9,000 RPM at 4° C. After drying the pellet, the pelleted RNA was dissolved in 0.5 ml RNase free water. The quality and quantity of total RNA was analyzed by denatured formaldehyde gel and spectrophotometer, respectively.

[0707] The resultant total RNA was used to isolate poly A+ RNA using an Oligo(dT) cellulose protocol (Invitrogen) and microcentrifuge spin columns (Invitrogen) by the following protocol. Approximately twenty mg of total RNA was twice subjected to purification to obtain high quality poly A+ RNA. Poly A+ RNA product was analyzed by performing denatured formaldehyde gel and subsequent RT-PCR of known full-length genes to ensure high quality of mRNA.

[0708] Next, poly A+ RNA was used as template to produce a cDNA library employing cDNA synthesis kit, ZAP-cDNA synthesis kit, and ZAP-cDNA Gigapack III gold cloning kit (Stratagene, La Jolla, Calif.). The method involved following the manufacturer's protocol as specified. Approximately 8 μg of poly A+ RNA was used to construct cDNA library. Analysis of the primary library revealed about 2.5×10⁶-1×10⁷ pfu. A quality background test of the library was completed by complementation assays using IPTG and X-gal, where recombinant plaques was expressed at more than 100-fold above the background reaction.

[0709] A more quantitative analysis of the library by random PCR showed that average size of insert cDNA was approximately 1.2 kb. The method used a two-step PCR method. For the first step, reverse primers were designed based on the preliminary sequence information obtained from p450 fragments. The designed reverse primers and T3 (forward) primers were used to amplify corresponding genes from the cDNA library. PCR reactions were subjected to agarose electrophoresis and the corresponding bands of high molecular weight were excised, purified, cloned and sequenced. In the second step, new primers designed from 5′UTR or the start coding region of p450 as the forward primers together with the reverse primers (designed from 3′UTR of p450) were used in the subsequent PCR to obtain full-length p450 clones.

[0710] The p450 fragments were generated by PCR amplification from the constructed cDNA library as described in Example 3 with the exception of the reverse primer. The T7 primer located on the plasmid downstream of cDNA inserts was used as a reverse primer. PCR fragments were isolated, cloned and sequenced as described in Example 4.

[0711] Full-length p450 genes were isolated by this PCR method from constructed cDNA library. Gene specific reverse primers (designed from the downstream sequence of p450 fragments) and a forward primer (T3 on library plasmid) were used to clone the full-length genes. PCR fragments were isolated, cloned and sequenced. If necessary, a second PCR step was applied. In the second step, new forward primers designed from 5′UTR of cloned p450s together with the reverse primers designed from 3′UTR of p450 clones were used in the subsequent PCR reactions to obtain full-length p450 clones. The clones were subsequently sequenced.

### EXAMPLE 6

### Characterization of Cloned Fragments—Reverse Southern Blotting Analysis

[0712] Nonradioactive large-scale reverse Southern blotting assays were performed on all p450 clones identified in above examples to detect the differential expression. It was observed that the level of expression among different p450 clusters was very different. Further real time detection was conducted on those with high expression.

[0713] Nonradioactive Southern blotting procedures were conducted as follows.

[0714] 1) Total RNA was extracted from ethylene treated and nontreated converter (58-33) and nonconverter (58-25) leaves using the Qiagen Rnaeasy kit as described in Example 2.

[0715] 2) A probe was produced by biotin-tail labeling a single strand cDNA derived from poly A+ enriched RNA generated in above step. This labeled single strand cDNA was generated by RT-PCR of the converter and nonconverter total RNA (Invitrogen) as described in Example 3 with the exception of using biotinylated oligo dT as a primer (Promega). These were used as a probe to hybridize with cloned DNA.

[0716] 3) Plasmid DNA was digested with restriction enzyme EcoR1 and run on agarose gels. Gels were simultaneously dried and transferred to two nylon membranes (Biodyne B). One membrane was hybridized with converter probe and the other with nonconverter probe. Membranes were UV-crosslinked (auto crosslink setting, 254 nm, Stratagene, Stratalinker) before hybridization.

[0717] Alternatively, the inserts were PCR amplified from each plasmid using the sequences located on both arms of p-GEM plasmid, T3 and SP6, as primers. The PCR products were analyzed by running on a 96 well Ready-to-run agarose gels. The confirmed inserts were dotted on two nylon membranes. One membrane was hybridized with converter probe and the other with nonconverter probe.

[0718] 4) The membranes were hybridized and washed following the manufacturer's instructions with the modification of washing stringency (Enzo MaxSence kit, Enzo Diagnostics, Inc, Farmingdale, N.Y.). The membranes were prehybridized with hybridization buffer (2×SSC buffered formamide, containing detergent and hybridization enhancers) at 42° C. for 30 min and hybridized with 10 μl denatured probe overnight at 42° C. The membranes then were washed in 1× hybridization wash buffer 1 time at room temperature for 10 min and 4 times at 68° C. for 15 min. The membranes were ready for the detection procedure.

[0719] 5) The washed membranes were detected by alkaline phosphatase labeling followed by NBT/BCIP colometric detection as described in manufacturer's detection procedure (Enzo Diagnostics, Inc.). The membranes were blocked for one hour at room temperature with 1× blocking solution, washed 3 times with 1× detection reagents for 10 min, washed 2 times with 1× predevelopment reaction buffer for 5 min and then developed the blots in developing solution for 30-45 min until the dots appear. All reagents were provided by the manufacturer (Enzo Diagnostics, Inc). In addition, large-scale reverse Southern assay was also performed using KPL Southern hybridization and detection kit following the manufacturer's instructions (KPL, Gaithersburg, Md.).

### EXAMPLE 7

### Characterization of Clones—Northern Blot Analysis

[0720] As an alternative to Southern blot analysis, some membranes were hybridized and detected as described in the example of Northern blotting assays. Northern hybridization was used to detect mRNA differentially expressed in Nicotiana as follows.

[0721] A random priming method was used to prepare probes from cloned p450 (Megaprime DNA Labelling Systems, Amersham Biosciences). The following components were mixed: 25 ng denatured DNA template; 4 ul of each unlabeled dTTP, dGTP and dCTP; 5 ul of reaction buffer; P³²-labelled dATP and 2 ul of Klenow I; and H₂O, to bring the reaction to 50 μl . The mixture was incubated in 37° C. for 1-4 hours, and stopped with 2 μl of 0.5 M EDTA. The probe was denatured by incubation at 95° C. for 5 minutes before use.

[0722] RNA samples were prepared from ethylene treated and non-treated fresh leaves of several pairs of tobacco lines. In some cases poly A+ enriched RNA was used. Approximately 15 μg total RNA or 1.8 μg mRNA (methods of RNA and mRNA extraction as described in Example 5) were brought to equal volume with DEPC H₂O (5-10 μl). The same volume of loading buffer (1× MOPS; 18.5% Formaldehyde; 50% Formamide; 4% Ficoll 400; Bromophenolblue) and 0.5 μl EtBr (0.5 μg/μl) were added. The samples were subsequently denatured in preparation for separation of the RNA by electrophoresis.

[0723] Samples were subjected to electrophoresis on a formaldehyde gel (1% Agarose, 1× MOPS, 0.6 M Formaldehyde) with 1× MOP buffer (0.4 M Morpholinopropanesulfonic acid; 0.1 M Na-acetate-3× H2O; 10 mM EDTA; adjust to pH 7.2 with NaOH). RNA was transferred to a Hybond-N+ membrane (Nylon, Amersham Pharmacia Biotech) by capillary method in 10×SSC buffer (1.5 M NaCl; 0.15 M Na-citrate) for 24 hours. Membranes with RNA samples were UV-crosslinked (auto crosslink setting, 254 nm, Stratagene, Stratalinker) before hybridization.

[0724] The membrane was prehybridized for 1-4 hours at 42° C. with 5-10 ml prehybridization buffer (5×SSC; 50% Formamide; 5× Denhardt's-solution; 1% SDS; 100 μg/ml heat-denatured sheared non-homologous DNA). Old prehybridization buffer was discarded, and new prehybridization buffer and probe were added. The hybridization was carried out overnight at 42° C. The membrane was washed for 15 minutes with 2×SSC at room temperature, followed by a wash with 2×SSC.

[0725] As illustrated in Table 1 below, Northern blots and reverse Southern Blot were useful in determining which genes were induced by ethylene treatment relative to non-induced plants. Interestingly, not all fragments were affected similarly in the converter and nonconverter. Some of the cytochrome p450 fragments were partially sequenced to determine their structural relatedness. This information was used to subsequently isolate and characterize full-length gene clones of interest.

TABLE 1
The Effect of Ethylene Treatment on mRNA Induction

| | Induced mRNA Expression |
|---|---|
| | Ethylene Treatment |
| Fragments | Converter |
| D56-AC7 (SEQ ID No: 44) | + |
| D56-AG11 (SEQ ID No: 40) | + |
| D56-AC12 (SEQ ID No: 54) | + |
| D70A-AB5 (SEQ ID No: 104) | + |
| D73-AC9 (SEQ ID No: 52) | + |
| D70A-AA12 (SEQ ID No: 140) | + |
| D73A-AG3 (SEQ ID No: 138) | + |
| D34-52 (SEQ ID No: 70) | + |
| D56-AG6 (SEQ ID No: 60) | + |

[0726] Northern analysis was performed using full-length clones on tobacco tissue obtained from converter and nonconverter Burley lines that were induced by ethylene treatment. This analysis was used to identify full-length clones that showed elevated expression in ethylene induced converter lines relative to ethylene induced converter lines relative to ethylene induced nonconverter Burley lines. By so doing, the functionality relationship of full-length clones may be determined by comparing biochemical differences in leaf constituents between converter and non-converter lines.

[0727] As shown in Table 2 below, six clones showed significantly higher expression, as denoted by ++ and +++, in converter ethylene treated tissue in comparison to non-converter treated tissue, denoted by +. All of these clones showed little or no expression in converter and non-converter lines that were not ethylene treated.

TABLE 2
Clones with Elevated Expression in Converter Ethylene-Treated Tissue

| Full-Length Clones | Converter | Nonconverter |
|---|---|---|
| D101-BA2 (SEQ ID NO: 288) | ++ | + |
| D207-AA5 (SEQ ID NO: 212) | ++ | + |
| D208-AC8 (SEQ ID NO: 226) | +++ | + |
| D237-AD1 (SEQ ID NO: 234) | ++ | + |
| D89-AB1 (SEQ ID NO: 158) | ++ | + |
| D90A-BB3 (SEQ ID NO: 162) | ++ | + |

### EXAMPLE 8

### Immunodetection of Polypeptides Encoded by the Cloned Genes

[0728] Peptide regions corresponding to 20-22 amino acids in length from three p450 clones were selected for (1) having lower or no homology to other clones and (2) having good hydrophilicity and antigenicity. The amino acid sequences of the peptide regions selected from the respective p450 clones are listed below. The synthesized peptides were conjugated with KHL (keyhole limpet hemocyanin) and then injected into rabbits. Antisera were collected 2 and 4 weeks after the 4^{th} injection (Alpha Diagnostic Intl. Inc. San Antonio, Tex.).

| | | |
|---|---|---|
| D234-AD1 | DIDGSKSKLVKAHRKIDEILG | (SEQ ID NO:2266) |
| D90a-BB3 | RDAFREKETFDENDVEELNY | (SEQ ID NO:163) |
| D89-AB1 | FKNNGDEDRHFSQKLGDLADKY | (SEQ ID NO:2267) |

[0729] Antisera were examined for crossreactivity to target proteins from tobacco plant tissue by Western Blot analysis. Crude protein extracts were obtained from ethylene treated (0 to 40 hours) middle leaves of converter and nonconverter lines. Protein concentrations of the extracts were determined using RC DC Protein Assay Kit (BIO-RAD) following the manufacturer's protocol.

[0730] Two micrograms of protein were loaded onto each lane and the proteins were separated on 10% -20% gradient gels using the Laemmli SDS-PAGE system. The proteins were transferred from gels to PROTRAN Nitrocellulose Transfer Membranes (Schleicher & Schuell) with the Trans-Blot Semi-Dry cell (BIO-RAD). Target p450 proteins were detected and visualized with the ECL Advance Western Blotting Detection Kit (Amersham Biosciences). Primary antibodies against the synthetic-KLH conjugates were made in rabbits. Secondary antibody against rabbit IgG, coupled with peroxidase, was purchased from Sigma. Both primary and secondary antibodies were used at 1:1000 dilutions. Antibodies showed strong reactivity to a single band on the Western Blots indicating that the antisera were monospecific to the target peptide of interest. Antisera were also crossreactive with synthetic peptides conjugated to KLH.

### EXAMPLE 9

### Nucleic Acid Identity, Structure Relatedness of Isolated Nucleic Acid Fragments, and GeneChip® Hybridization

[0731] Over 100 cloned p450 fragments were sequenced in conjunction with Northern blot analysis to determine their structural relatedness. The approach used forward primers based either of two common p450 motifs located near the carboxyl-terminus of the p450 genes. The forward primers corresponded to cytochrome p450 motifs FXPERF (SEQ ID NO:2268) or GRRXCP(A/G) (SEQ ID NO:2269). The reverse primers used standard primers from either the plasmid, SP6 or T7 located on both arms of pGEM plasmid, or a poly A tail. The protocol used is described below.

[0732] Spectrophotometry was used to estimate the concentration of starting double-stranded DNA following the manufacturer's protocol (Beckman Coulter). The template was diluted with water to the appropriate concentration, denatured by heating at 95° C. for 2 minutes, and subsequently placed on ice. The sequencing reaction was prepared on ice using 0.5 to 10 μl of denatured DNA template, 2 μl of 1.6 pmole of the forward primer, 8 μl of DTCS Quick Start Master Mix and the total volume brought to 20 μl with water. The thermocycling program consisted of 30 cycles of the follow cycle: 96° C. for 20 seconds, 50° C. for 20 seconds, and 60° C. for 4 minutes followed by holding at 4° C.

[0733] The sequencing reaction was stopped by adding 5 μl of stop buffer (equal volume of 3M NaOAc and 100 mM EDTA and 1 μl of 20 mg/ml glycogen). The sample was precipitated with 60 μl of cold 95% ethanol and centrifuged at 6000×g for 6 minutes. Ethanol was discarded. The pellet was washed twice with 200 μl of cold 70% ethanol. After the pellet was dry, 40 μl of SLS solution were added and the pellet was resuspended. A layer of mineral oil was overlaid and the sample was placed on the CEQ 8000 Automated Sequencer for further analysis.

[0734] To verify nucleic acid sequences, the nucleic acid sequence was re-sequenced in both directions using forward primers to the FXPERF (SEQ ID NO:2268) or GRRXCP(A/G)(SEQ ID NO:2269) region of the p450 gene or reverse primers to either the plasmid or poly A tail. All sequencing was performed at least twice in both directions.

[0735] The nucleic acid sequences of cytochrome p450 fragments were compared to each other from the coding region corresponding to the first nucleic acid after the region encoding the GRRXCP(A/G) (SEQ ID NO:2269) motif through to the stop codon. This region was selected as an indicator of genetic diversity among p450 proteins. A large number of genetically distinct p450 genes, in excess of 70 genes, were observed, similar to that of other plant species. Upon comparison of nucleic acid sequences, it was found that the genes could be placed into distinct sequences groups based on their sequence identity. It was found that the best unique grouping of p450 members was determined to be those sequences with 75% nucleic acid identity or greater. (See e.g., Table 1 of the U.S. 2004/0162420 patent application publication, which is incorporated herein by reference.) Reducing the percentage identity resulted in significantly larger groups. A preferred grouping was observed for those sequences with 81% nucleic acid identity or greater, a more preferred grouping 91% nucleic acid identity or greater, and a most preferred grouping for those sequences 99% nucleic acid identity of greater. Most of the groups contained at least two members and frequently three or more members. Others were not repeatedly discovered suggesting that approach taken was able to isolated both low and high expressing mRNA in the tissue used.

[0736] Based on 75% nucleic acid identity or greater, two cytochrome p450 groups were found to contain nucleic acid sequence identity to previously tobacco cytochrome genes that are genetically distinct from those within the group. Group 23, showed nucleic acid identity, within the parameters used for Table 3A, to GenBank sequences GI:1171579 (SEQ ID NO:2270) (CAA64635) and GI:14423327 (SEQ ID NO:2271) (or AAK62346). GI:1171579 (SEQ ID NO:2270) had nucleic acid identity to Group 23 members ranging 96.9% to 99.5% identity to members of Group 23 while GI:14423327 (SEQ ID NO:2271) ranged 95.4% to 96.9% identity to this group. The members of Group 31 had nucleic acid identity ranging from 76.7% to 97.8% identity to the GenBank reported sequence of GI:14423319 (SEQ ID NO:2272) (AAK62342). None of the other p450 identity groups of Table 3A contained parameter identity, as used in Table 3A, to previously reported Nicotiana p450s genes.

[0737] A consensus sequence with appropriate nucleic acid degenerate probes could be derived for a group to preferentially identify and isolate additional members of each group from Nicotiana plants.

TABLE 3A
Nicotiana p450 Nucleic Acid Sequence Identity Groups

| GROUP | FRAGMENTS |
|---|---|
| 1 | D58-BG7 (SEQ ID NO: 10), D58-AB1 (SEQ ID NO: 12); D58-BE4 (SEQ ID |
| | NO: 16) |
| 2 | D56-AH7 (SEQ ID NO: 18); D13a-5 (SEQ ID NO: 20) |
| 3 | D56-AG10 (SEQ ID NO: 22); D35-33 (SEQ ID NO: 24); D34-62 (SEQ ID NO: 26) |
| 4 | D56-AA7 (SEQ ID NO: 28); D56-AE1 (SEQ ID NO: 30); 185-BD3 (SEQ ID |
| | NO: 152) |
| 5 | D35-BB7 (SEQ ID NO: 32); D177-BA7 (SEQ ID NO: 34); D56A-AB6 (SEQ ID |
| | NO: 36); D144-AE2 (SEQ ID NO: 38) |
| 6 | D56-AG11 (SEQ ID NO: 40); D179-AA1 (SEQ ID NO: 42) |
| 7 | D56-AC7 (SEQ ID NO: 44); D144-AD1 (SEQ ID NO: 46) |
| 8 | D144-AB5 (SEQ ID NO: 48) |
| 9 | D181-AB5 (SEQ ID NO: 50); D73-AC9 (SEQ ID NO: 52) |
| 10 | D56-AC12 (SEQ ID NO: 54) |
| 11 | D58-AB9 (SEQ ID NO: 56); D56-AG9 (SEQ ID NO: 58); D56-AG6 (SEQ ID |
| | NO: 60); D35-BG11 (SEQ ID NO: 62); D35-42 (SEQ ID NO: 64); D35-BA3 (SEQ ID |
| | NO: 66); D34-57 (SEQ ID NO: 68); D34-52 (SEQ ID NO: 70); D34-25 (SEQ ID NO: 72) |
| 12 | D56-AD10 (SEQ ID NO: 74) |
| 13 | 56-AA11 (SEQ ID NO: 76) |
| 14 | D177-BD5 (SEQ ID NO: 78); D177-BD7 (SEQ ID NO: 92) |
| 15 | D56A-AG10 (SEQ ID NO: 80); D58-BC5 (SEQ ID NO: 82); D58-AD12 (SEQ ID |
| | NO: 84) |
| 16 | D56-AC11 (SEQ ID NO: 86); D35-39 (SEQ ID NO: 88); D58-BH4 (SEQ ID |
| | NO: 90); D56-AD6 (SEQ ID NO: 96) |
| 17 | D73A-AD6 (SEQ ID NO: 98); D70A-BA11 (SEQ ID NO: 100) |
| 18 | D70A-AB5 (SEQ ID NO: 104); D70A-AA8 (SEQ ID NO: 106) |
| 19 | D70A-AB8 (SEQ ID NO: 108); D70A-BH2 (SEQ ID NO: 110); D70A-AA4 (SEQ |
| | ID NO: 112) |
| 20 | D70A-BA1 (SEQ ID NO: 114); D70A-BA9 (SEQ ID NO: 116) |
| 21 | D70A-BD4 (SEQ ID NO: 118) |
| 22 | D181-AC5 (SEQ ID NO: 120); D144-AH1 (SEQ ID NO: 122); D34-65 (SEQ ID |
| | NO: 124) |
| 23 | D35-BG2 (SEQ ID NO: 126) |
| 24 | D73A-AH7 (SEQ ID NO: 128) |
| 25 | D58-AA1 (SEQ ID NO: 130); D185-BC1 (SEQ ID NO: 142); D185-BG2 (SEQ ID |
| | NO: 144) |
| 26 | D73-AE10 (SEQ ID NO: 132) |
| 27 | D56-AC12 (SEQ ID NO: 134) |
| 28 | D177-BF7 (SEQ ID NO: 136); D185-BE1 (SEQ ID NO: 146); D185-BD2 (SEQ ID |
| | NO: 148) |
| 29 | D73A-AG3 (SEQ ID NO: 138) |
| 30 | D70A-AA12 (SEQ ID NO: 140); D176-BF2 (SEQ ID NO: 94) |
| 31 | D176-BC3 (SEQ ID NO: 154) |
| 32 | D176-BB3 (SEQ ID NO: 156) |
| 33 | D186-AH4 (SEQ ID NO: 14) |

[0738] GeneChip® microarray hybridization (Affymetrix Inc.; Santa Clara, Calif.) was used to identify genes with differential expression patterns between the converter and nonconverter near isogenic lines following ethylene activation. The chip size was 18 micron and the array format was 100-2187, accommodating 528 probe sets (11,628 probes). Seven pairs of hybridization were used to obtain independent verification of microarray results. These consisted of one pair (converter/nonconverter) of 4407-33/4407-25 non-treated Burley tobacco samples, four pairs of ethylene treated 4407-33/4407-25 samples, one pair of ethylene treated dark tobacco NL Madole/181, another pair of lines near isogenic for nicotine conversion, and one pair of naturally senesced leaves of 4407=33/25 (Table 3B).

TABLE 3B
Converter: nonconverter normalized signal ratios from GeneChip ®
hybridization

| | Untreated | | | | | Ethylene | |
|---|---|---|---|---|---|---|---|
| | Burley | Ethylene Treated Burley | | | | Treated Dark | Senescence |
| | (4407- | (4407-33/25) | | | | (178/NL | Burley |
| | 33/25) | Exp 1 | Exp 2 | Exp 3 | Exp 4 | Madole) | (4407-33/25) |
| Induced | | | | | | | |
| D121-AA8 | 1.03 | 2.143 | 12.90 | 5.17 | 12.19 | 16.60 | 2.57 |
| D120-AH4 | 1.44 | 1.90 | 12.74 | 2.87 | 7.55 | 8.17 | 1.69 |
| D35-BG11 | 1.73 | 2.32 | 13.06 | 22.22 | 19.10 | 28.76 | 3.40 |
| Control | | | | | | | |
| Actin-Like I (5′) | 1.18 | 0.99 | 0.74 | 0.73 | 0.57 | 1.02 | 0.97 |
| Actin-Like I (3′) | 1.09 | 1.12 | 0.81 | 1.08 | 0.79 | 0.93 | 0.85 |

[0739] All 14 sets of hybridizations were successful as evidenced by the Expression Report generated using detection instruments by Genome Explorations, Inc. (Memphis, Tenn.). The main reports included analyses of Noise, Scale factor, background, total probe sets, number and percentage of present and absent probe sets, signal intensity of housekeeping controls. The data were subsequently analyzed and presented using software GCOS in combination with other software. Signal comparisons between treatment pairs were made, and overall data for all respective probes for all hybridizations were compiled and the expression data were also analyzed. Results based on the signal intensities showed that only two genes, D121-AA8 and D120-AH4 and one fragment, D35-BG11, which is a partial fragment of D121-AA8, had reproducible induction in ethylene-treated converter lines when compared to non-converter lines. The signal of a gene in a converter line, for example, Burley tobacco variety 4407-33, was determined as the ratio to the signal of a gene in a related non-converter isogenic line, 4407-25. Without ethylene treatment, the ratio of converter to non-converter signals for all genes approached 1.00. To eliminate the influence of background differences, normalized signal ratios were also calculated. Normalized signal ratios are obtained by dividing the treated pair ratio with the corresponding non-pair ratio. Upon ethylene treatment and analysis, it was determined that two genes, D121-AA8 and D120-AH4, were induced in converter lines relative to non-converter lines as determined by four independent analyses. These two genes share 99.8% relative homology and their relative hybridization signals in converter varieties ranged from approximately 2 to 22 fold higher than the signals in their non-converter counterparts. Based on the normalized ratios, two actin-like, internal control clones, were not induced in converter lines. In addition, a fragment (D35-BG11), whose coding region is entirely contained in both the D121-AA8 and D120-AH4 genes, was highly induced in the same samples of paired isogenic converter and nonconverter lines. Furthermore, D121-AA8 and D120-AH4 genes were strongly induced in converter lines of isogenic dark tobacco pairs, NL Madole and 181 (8 to 28 fold), thus demonstrating that ethylene induction of these genes in converter lines was an in planta response. The same genes were identified in the comparisons made from hybridizations of naturally senesced samples of 4407-33/25 as well. RT-PCR assays of these materials using primers specific for D121-AA8 verified the microarray results for this gene.

[0740] Based on these results, the D121-AA8 gene (the cDNA sequence of which is the sequence of SEQ ID NO:5; FIG. 4) was identified as the tobacco nicotine demethylase gene of interest. In view of the p450 nomenclature rule, it was determined that D121-AA8 is most similar to the p450s in the CYP82E family (The Arabidopsis Genome Initiative (AGI) and The Arabidopsis Information Resource (TAIR); Frank, Plant Physiol. 110: 1035-1046, 1996; Whitbred et al., Plant Physiol. 124:47-58, 2000); Schopfer and Ebel, Mol. Gen. Genet. 258:315-322, 1998; and Takemoto et al., Plant Cell Physiol. 40:1232-1242, 1999).

### EXAMPLE 10

### Biochemical Analysis of Enzymatic Activity

[0741] Biochemical analysis, for example, as described in previously filed applications that are incorporated herein by reference, determined that the sequence of SEQ ID NO:5 encodes a tobacco nicotine demethylase (SEQ ID NO:3; FIGS. 3 and 4).

[0742] In particular, the function of candidate clone D121-AA8 was confirmed as the coding gene for nicotine demethylase, by assaying enzyme activity of heterologously expressed p450 in yeast cells as follows.

1. Construction of Yeast Expression Vector

[0743] The putative protein-coding sequence of the tobacco nicotine demethylase-encoding cDNA (D121-AA8), D120-AH4, D121-AA8, 208-AC-8, and D208-AD9, were cloned into the yeast expression vector pYeDP60. Appropriate BamHI and MfeI sites (underlined below) were introduced via PCR primers containing these sequences either upstream of the translation start codon (ATG) or downstream of the stop codon (TAA). The MfeI on the amplified PCR product is compatible with the EcoRI site on the vector. The primers used to amplify the D121-AA8 cDNA were 5′-TAGCTACGCGGATCCATGCTTTCTCCCATAGAAGCC-3′ (SEQ ID NO:2194) and 5′-CTGGATCACAATTGTTAGTGATGGTGATGGTGATGCGATCCTCTATAAAGCTCAGGTGCCAGGC-3′ (SEQ ID NO:2297). A segment of sequence coding nine extra amino acids at the C-terminus of the protein, including six histidines, was incorporated into the reverse primer to facilitate expression of 6-His tagged p450 upon induction. PCR products were ligated into pYeDP60 vector after enzyme digestions in the sense orientation with reference to the GAL10-CYC1 promoter. Proper construction of the yeast expression vectors was verified by restriction enzyme analysis and DNA sequencing. In addition, expression of the p450 proteins was visualized on SDS-PAGE gel electrophoresis for the detergent phase of the yeast micorsomes. The predicted size of the p450 proteins is 59 kD, based on the gene sequence; a result that was confirmed by the gel analysis.

2. Yeast Transformation

[0744] The WAT11 yeast line, modified to express Arabidopsis NADPH-cytochrome p450 reductase ATR1, was transformed with the pYeDP60-p450 cDNA plasmids. Fifty micro-liters of WAT11 yeast cell suspension was mixed with ˜1 μg plasmid DNA in a cuvette with 0.2-cm electrode gap. One pulse at 2.0 kV was applied by an Eppendorf electroporator (Model 2510). Cells were spread onto SGI plates (5 g/L bactocasamino acids, 6.7 g/L yeast nitrogen base without amino acids, 20 g/L glucose, 40 mg/L DL-tryptophan, 20 g/L agar). Transformants were confirmed by PCR analysis performed directly on randomly selected colonies.

3. p450 Expression in Transformed Yeast Cells

[0745] Single yeast colonies were used to inoculate 30 mL SGI media (5 g/L bactocasamino acids, 6.7 g/L yeast nitrogen base without amino acids, 20 g/L glucose, 40 mg/L DL-tryptophan) and grown at 30° C. for about 24 hours. An aliquot of this culture was diluted 1:50 into 1000 mL of YPGE media (10 g/L yeast extract, 20 gL bacto peptone, 5 g/L glucose, 30 ml/L ethanol) and grown until glucose was completely consumed as indicated by the colorimetric change of a Diastix urinalysis reagent strip (Bayer, Elkhart, Ind.). Induction of cloned P450 was initiated by adding DL-galactose to a final concentration of 2%. The cultures were grown for an additional 20 hours before used for in vivo activity assay or for microsome preparation.

[0746] WAT11 yeast cells expressing pYeDP60-CYP71D20 (a p450 catalyzing the hydroxylation of 5-epi-aristolochene and 1-deoxycapsidiol in Nicotiana tabacum) were used as control for the p450 expression and enzyme activity assays.

[0747] To evaluate the effectiveness of the yeast expression of the p450 in great detail, reduced CO difference spectroscopy was performed. The reduced CO spectrum exhibited a peak at 450 nm proteins from all four p450 transformed yeast lines. No similar peaks were observed in control microsomes derived from control, untransformed yeast cells or the blank, vector control yeast cells. The results indicated that p450 proteins were expressed effectively in yeast lines harboring the pYeDP60-CYP 450. Concentrations of expressed p450 protein in yeast microsome ranged from 45 to 68 nmole/mg of total protein.

4. In Vivo Enzyme Assay

[0748] The nicotine demethylase activity in the transformed yeast cells were assayed by feeding of yeast culture with DL-Nicotine (Pyrrolidine-2-¹⁴C). ¹⁴C labeled nicotine (54 mCi/mmol) was added to 75 μl of the galactose-induced culture for a final concentration of 55 μM. The assay culture was incubated with shaking in 14 ml polypropylene tubes for 6 hours and was extracted with 900 μl methanol. After spinning, 20 μl of the methanol extract was separated with an rp-HPLC and the nornicotine fraction was quantitated by LSC.

[0749] The control culture of WAT11 (pYeDP60-CYP71D20) did not convert nicotine to nornicotine, showing that the WAT11 yeast strain does not contain endogenous enzyme activities that can catalyze the step of nicotine bioconversion to nornicotine. In contrast, yeast expressing the tobacco nicotine demethylase gene produced detectable amount of nornicotine, indicating the nicotine demethylase activity of the translation product of SEQ ID NO:4 or SEQ ID NO:5.

5. Yeast Microsome Preparation

[0750] After induction by galactose for 20 hours, yeast cells were collected by centrifugation and washed twice with TES-M buffer (50 mM Tris-HCl, pH 7.5, 1 mM EDTA, 0.6 M sorbitol, 10 mM 2-mercaptoethanol). The pellet was resuspended in extraction buffer (50 mM Tris-HCl, pH 7.5, 1 mM EDTA, 0.6 M sorbitol, 2 mM 2-mercaptoethanol, 1% bovine serum album, Protease Inhibitor Cocktail (Roche) at 1 tablet/50 ml). Cells were then broken with glass beads (0.5 mm in diameter, Sigma) and the cell extract was centrifuged for 20 min at 20,000×g to remove cellular debris. The supernatant was subjected to ultracentrifugation at 100,000×g for 60 min and the resultant pellet contained the microsomal fraction. The microsomal fraction was suspended in TEG-M buffer (50 mM Tris-HCl, pH 7.5, 1 mM EDTA, 20% glycerol and 1.5 mM 2-mercaptoethanol) at protein concentration of 1 mg/mL. Microsomal preparations were stored in a liquid nitrogen freezer until use.

6. Enzyme Activity Assay in Yeast Microsomal Preparations

[0751] Nicotine demethylase activity assays with yeast microsomal preparations were performed. In particular, DL-Nicotine (Pyrrolidine-2-¹⁴C) was obtained from Moravek Biochemicals and had a specific activity of 54 mCi/mmol. Chlorpromazine (CPZ) and oxidized cytochrome c (cyt. C), both P450 inhibitors, were purchased from Sigma. The reduced form of nicotinamide adenine dinucleotide phosphate (NADPH) is the typical electron donor for cytochrome P450 via the NADPH:cytochrome P450 reductase. NADPH was omitted for control incubation. The routine enzyme assay included microsomal proteins (around 1 mg/ml), 6 mM NADPH, and 55 μM ¹⁴C labeled nicotine. The concentration of CPZ and Cyt. C, when used, was 1 mM and 100 μM, respectively. The reaction was carried at 25° C. for 1 hour and was stopped with the addition of 300 μl methanol to each 25 μl reaction mixture. After centrigugation, 20 μl of the methanol extract was separated with a reverse-phase High Performance Liquid Chromatography (HPLC) system (Agilent) using an Inertsil ODS-3 3μ (150×4.6 mm) chromatography column from Varian. The isocratic mobile phase was the mixture of methanol and 50 mM potassium phosphate buffer, pH 6.25, with ratio of 60:40 (v/v) and the flow rate was 1 ml/min. The nornicotine peak, as determined by comparison with authentic non-labeled nornicotine, was collected and subjected to 2900 tri-carb Liquid Scintillation Counter (LSC) (Perkin Elmer) for quantification. The activity of nicotine demethylase is calculated based on the production of ¹⁴C labeled nornicotine over 1 hour incubation.

[0752] p450-like activity was observed in microsomal preparations from control yeast cells expressing CYP71D20 and the three test p450 yeast cultures transformed with the genes D120-AH4, D208-AC8, and D208-AD9. However, the control and the three test p450s did not show any nornicotine conversion formation suggesting that they did not contain an endogenous or induced enzyme that can catalyze the demethylation of nicotine. In contrast, results from HPLC and LSC analyses showed detectable quantities of nornicotine produced from the demethylation of nicotine using microsomal samples obtained from yeast cells expressing the tobacco nicotine demethylase gene (D121-AA8). These results indicate that the nicotine demethylase activity results from the D121-AA8 gene product. The nicotine demethylase activity required NADPH and was shown to be inhibited by p450 specific inhibitors, consistent with tobacco nicotine demethylase being a p450. The enzyme activity for tobacco nicotine demethylase (D121-AA8) was approximately 10.8 pKat/mg protein as calculated by radioactive intensity and protein concentrations. A typical set of enzyme assay results obtained for the yeast cells is shown in the following table (Table 4).

TABLE 4
DEMETHYLASE ACTIVITY IN MICROSOMES OF YEAST CELLS
EXPRESSING D121-AA8 AND CONTROL P450 GENES

| | | Microsomes + 1 mM | Microsomes + 100 μM | |
|---|---|---|---|---|
| Sample | Microsomes | chlorpromazine | cytochrome C | Microsomes − NADPH |
| D121-AA8 | 10.8 ± 1.2* pkat/mg | 1.4 ± 1.3 pkat/mg | 2.4 ± 0.7 pkat/mg | 0.4 ± 0.1 pkat/mg |
| | protein | protein | protein | protein |
| Control | Not Detected | Not Detected | Not Detected | Not Detected |
| (CYP71D20) | | | | |

*n = 12, others n = 3

[0753] Omission of NADPH from the assay using microsomes derived from D121-AA8 yeast cells resulted in the abolishment of nicotine demethylase activity; hence no nornicotine was formed (Table 4). When two known P450 inhibitors, Chlorpromazine (CPZ, 1 mM) and oxidized cytochrome c (cyt C, 100 μM,) were added into the enzyme assay mixtures separately and incubated for 1 hour before adding the methanol stop solution, nicotine demethylase activities were decreased significantly (Table 4). Together these experiments demonstrated that D121-AA8 encodes a cytochrome p450 protein that catalyzes the conversion of nicotine to nornicotine when expressed in yeast.

### EXAMPLE 11

### Related Amino Acid Sequence Identity of Isolated Nucleic Acid Fragments

[0754] The amino acid sequences of nucleic acid sequences obtained for cytochrome p450 fragments from Example 8 were deduced. The deduced region corresponded to the amino acid immediately after the GXRXCP(A/G) (SEQ ID NO:2273) sequence motif to the end of the carboxyl-terminus, or stop codon. Upon comparison of sequence identity of the fragments, a unique grouping was observed for those sequences with 70% amino acid identity or greater. A preferred grouping was observed for those sequences with 80% amino acid identity or greater, more preferred with 90% amino acid identity or greater, and a most preferred grouping for those sequences 99% amino acid identity of greater. Several of the unique nucleic acid sequences were found to have complete amino acid identity to other fragments and therefore only one member with the identical amino acid was reported.

[0755] The amino acid identity for Group 19 of Table 5 corresponded to three distinct groups based on their nucleic acid sequences. The amino acid sequence of group members and their identity is shown in FIG. 159H. The amino acid differences are indicated.

[0756] At least one member of each amino acid identity group was selected for gene cloning and functional studies using plants. In addition, group members that are differentially affected by ethylene treatment or other biological differences as assessed by Northern and Southern analysis were selected for gene cloning and functional studies. To assist in gene cloning, expression studies and whole plant evaluations, peptide specific antibodies can be prepared based on sequence identity and differential sequence.

TABLE 5
Nicotiana p450 Amino Acid Sequence Identity Groups

| GROUP | FRAGMENTS |
|---|---|
| 1 | D58-BG7 (SEQ ID NO: 11), D58-AB1 (SEQ ID NO: 13) |
| 2 | D58-BE4 (SEQ ID NO: 17) |
| 3 | D56-AH7 (SEQ ID NO: 19); D13a-5 (SEQ ID NO: 21) |
| 4 | D56-AG10 (SEQ ID NO: 23); D34-62 (SEQ ID NO: 27) |
| 5 | D56-AA7 (SEQ ID NO: 29); D56-AE1 (SEQ ID NO: 31); 185-BD3 (SEQ ID NO: 153) |
| 6 | D35-BB7 (SEQ ID NO: 33); D177-BA7 (SEQ ID NO: 35); D56A-AB6 (SEQ ID NO: 37); |
| | D144-AE2 (SEQ ID NO: 39) |
| 7 | D56-AG11 (SEQ ID NO: 41); D179-AA1 (SEQ ID NO: 43) |
| 8 | D56-AC7 (SEQ ID NO: 45); D144-AD1 (SEQ ID NO: 47) |
| 9 | D144-AB5 (SEQ ID NO: 49) |
| 10 | D181-AB5 (SEQ ID NO: 51); D73-AC9 (SEQ ID NO: 53) |
| 11 | D56-AC12 (SEQ ID NO: 55) |
| 12 | D58-AB9 (SEQ ID NO: 57); D56-AG9 (SEQ ID NO: 59); D56-AG6 (SEQ ID NO: 61); |
| | D35-BG11 (SEQ ID NO: 63); D35-42 (SEQ ID NO: 65); D35-BA3 (SEQ ID NO: 67); D34-57 |
| | (SEQ ID NO: 69); D34-52 (SEQ ID NO: 71) |
| 13 | D56AD10 (SEQ ID NO: 75) |
| 14 | D56-AA11 (SEQ ID NO: 77) |
| 15 | D177-BD5 (SEQ ID NO: 79); D177-BD7 (SEQ ID NO: 93) |
| 16 | D56A-AG10 (SEQ ID NO: 81); D58-BC5 (SEQ ID NO: 83); D58-AD12 (SEQ ID NO: 85) |
| 17 | D56-AC11 (SEQ ID NO: 87); D56-AD6 (SEQ ID NO: 97) |
| 18 | D73A-AD6 (SEQ ID NO: 99) |
| 19 | D70A-AB5 (SEQ ID NO: 105); D70A-AB8 (SEQ ID NO: 109); D70A-BH2 (SEQ ID |
| | NO: 111); D70A-AA4 (SEQ ID NO: 113); D70A-BA1 (SEQ ID NO: 115); D70A-BA9 (SEQ ID |
| | NO: 117) |
| 20 | D70A-BD4 (SEQ ID NO: 119) |
| 21 | D181-AC5 (SEQ ID NO: 121); D144-AH1 (SEQ ID NO: 123); D34-65 (SEQ ID NO: 125) |
| 22 | D35-BG2 (SEQ ID NO: 127) |
| 23 | D73A-AH7 (SEQ ID NO: 129) |
| 24 | D58-AA1 (SEQ ID NO: 131); D185-BC1 (SEQ ID NO: 143); D185-BG2 (SEQ ID |
| | NO: 145) |
| 25 | D73-AE10 (SEQ ID NO: 133) |
| 26 | D56-AC12 (SEQ ID NO: 135) |
| 27 | D177-BF7 (SEQ ID NO: 137); 185-BD2 (SEQ ID NO: 149) |
| 28 | D73A-AG3 (SEQ ID NO: 139) |
| 29 | D70A-AA12 (SEQ ID NO: 141); D176-BF2 (SEQ ID NO: 95) |
| 30 | D176-BC3 (SEQ ID NO: 155) |
| 31 | D176-BB3 (SEQ ID NO: 157) |
| 32 | D186-AH4 (SEQ ID NO: 15) |

### EXAMPLE 12

### Related Amino Acid Sequence Identity of Full-Length Clones

[0757] The nucleic acid sequence of full-length Nicotiana genes cloned in Example 5 were deduced for their entire amino acid sequence. Cytochrome p450 genes were identified by the presence of three conserved p450 domain motifs, which corresponded to UXXRXXZ (SEQ ID NO:2274), PXRFXF (SEQ ID NO:2275) or GXRXC (SEQ ID NO:2276) at the carboxyl-terminus where U is E or K, X is any amino acid and Z is P, T, S or M. All p450 genes were characterized for amino acid identity using a BLAST program comparing their full-length sequences to each other and to known tobacco genes. The program used the NCBI special BLAST tool (Align two sequences (b12seq), http://www.ncbi.nlm.nih.gov/blast/b12seq/b12.html). Two sequences were aligned under BLASTN without filter for nucleic acid sequences and BLASTP for amino acid sequences. Based on their percentage amino acid identity, each sequence was grouped into identity groups where the grouping contained members that shared at least 85% identity with another member. A preferred grouping was observed for those sequences with 90% amino acid identity or greater, a more preferred grouping had 95% amino acid identity or greater, and a most preferred grouping had those sequences 99% amino acid identity or greater. Using these criteria, 25 unique groups were identified and are depicted in Table 6. The amino acid sequence of the full-length nicotine demethylase gene was deduced to have the sequence provided in SEQ ID NO:5 (FIG. 4).

[0758] Within the parameters used for Table 6 for amino acid identity, three groups were found to contain greater than 85% or greater identity to known tobacco genes. Members of Group 5 had up to 96% amino acid identity for the full-length sequence to GenBank sequence GI:14423327 (SEQ ID NO:2271) (or AAK62346). Group 23 had up to 93% amino acid identity to GI:14423328 (SEQ ID NO:2277) (or AAK62347) and Group 24 had 92% identity to GI:14423318 (SEQ ID NO:2278) (or AAK62343).

TABLE 6
Amino Acid Sequence Identity Groups of Full-Length Nicotiana p450 Genes

| | |
|---|---|
| 1 | D208-AD9 (SEQ ID NO: 233); D120-AH4 (SEQ ID NO: 189); D121-AA8 (SEQ ID |
| | NO: 191), D122-AF10 (SEQ ID NO: 193); D103-AH3 (SEQ ID NO: 231); D208-AC8 (SEQ ID |
| | NO: 227); D235-AB1 (SEQ ID NO: 255) |
| 2 | D244-AD4 (SEQ ID NO: 259); D244-AB6 (SEQ ID NO: 283); D285-AA8 (SEQ ID |
| | NO: 2205); D285-AB9 (SEQ ID NO: 2206); D268-AE2 (SEQ ID NO: 279) |
| 3 | D100A-AC3 (SEQ ID NO: 177); D100A-BE2 (SEQ ID NO: 2209) |
| 4 | D205-BE9 (SEQ ID NO: 285); D205-BG9 (SEQ ID NO: 211); D205-AH4 (SEQ ID |
| | NO: 303) |
| 5 | D259-AB9 (SEQ ID NO: 269); D257-AE4 (SEQ ID NO: 277); D147-AD3 (SEQ ID |
| | NO: 203) |
| 6 | D249-AE8 (SEQ ID NO: 265); D-248-AA6 (SEQ ID NO: 263) |
| 7 | D233-AG7 (SEQ ID NO: 275); D224-BD11 (SEQ ID NO: 249); DAF10 |
| 8 | D105-AD6 (SEQ ID NO: 181); D215-AB5 (SEQ ID NO: 229); D135-AE1 (SEQ ID |
| | NO: 199) |
| 9 | D87A-AF3 (SEQ ID NO: 225), D210-BD4 (SEQ ID NO: 273) |
| 10 | D89-AB1 (SEQ ID NO: 159); D89-AD2 (SEQ ID NO: 161); D163-AG11 (SEQ ID |
| | NO: 207); D163-AF12 (SEQ ID NO: 205) |
| 11 | D267-AF10 (SEQ ID NO: 305); D96-AC2 (SEQ ID NO: 169); D96-AB6 (SEQ ID |
| | NO: 167); D207-AA5 (SEQ ID NO: 213); D207-AB4 (SEQ ID NO: 215); D207-AC4 (SEQ ID |
| | NO: 217) |
| 12 | D98-AG1 (SEQ ID NO: 173); D98-AA1 (SEQ ID NO: 171) |
| 13 | D209-AA12 (SEQ ID NO: 221); D209-AA11; D209-AH10 (SEQ ID NO: 223); D209-AH12 |
| | (SEQ ID NO: 241); D90A-BB3 (SEQ ID NO: 163) |
| 14 | D129-AD10 (SEQ ID NO: 197); D104A-AE8 (SEQ ID NO: 179) |
| 15 | D228-AH8 (SEQ ID NO: 253); D228-AD7 (SEQ ID NO: 251), D250-AC11 (SEQ ID |
| | NO: 267); D247-AH1 (SEQ ID NO: 261) |
| 16 | D128-AB7 (SEQ ID NO: 195); D243-AA2 (SEQ ID NO: 257); D125-AF11 (SEQ ID |
| | NO: 237) |
| 17 | D284-AH5 (SEQ ID NO: 307); D110-AF12 (SEQ ID NO: 185) |
| 18 | D221-BB8 (SEQ ID NO: 243) |
| 19 | D222-BH4 (SEQ ID NO: 245) |
| 20 | D134-AE11 (SEQ ID NO: 239) |
| 21 | D109-AH8 (SEQ ID NO: 183) |
| 22 | D136-AF4 (SEQ ID NO: 287) |
| 23 | D237-AD1 (SEQ ID NO: 235) |
| 24 | D112-AA5 (SEQ ID NO: 187) |
| 25 | D283-AC1 (SEQ ID NO: 281) |

[0759] The full-length genes were further grouped based on the highly conserved amino acid homology between UXXRXXZ p450 domain (SEQ ID NO:2274) and GXRXC p450 domain (SEQ ID NO:2276) near the end the carboxyl-terminus. As shown in FIGS. 160A to 160E, individual clones were aligned based on the sequence homology between the conserved domains and placed in distinct identity groups. In several cases, although the nucleic acid sequence of the clone was unique, the amino acid sequence for the region was identical. The preferred grouping was observed for those sequences with 90% amino acid identity or greater, a more preferred group had 95% amino acid identity or greater, and a most preferred grouping had those sequences 99% amino acid identity of greater. The final grouping was similar to that based on the percent identity for the entire amino acid sequence of the clones except for Group 17 (of Table 6) which was divided into two distinct groups.

[0760] Within the parameters used for amino acid identity in Table 7, three groups were found to contain 90% or greater identity to known tobacco genes. Members of Group 5 had up to 93.4% amino acid identity for full length sequences to the GenBank sequence of GI:14423326 (SEQ ID NO:2279) (or AAK62346). Group 23 had up to 91.8% amino acid identity to GI:14423328 (SEQ ID NO:2277) (or AAK62347) and Group 24 had 98.8% identity to GI:14423318 (SEQ ID NO:2278) (or AAK62342).

TABLE 7
Amino Acid Sequence Identity Groups of Regions between Conserved Domains of
Nicotiana p450 Genes

| | |
|---|---|
| 1 | D208-AD9 (SEQ ID NO: 233); D120-AH4 (SEQ ID NO: 189); D121-AA8 (SEQ ID |
| | NO: 191), D122-AF10 (SEQ ID NO: 193); D103-AH3 (SEQ ID NO: 231); D208-AC8 (SEQ ID |
| | NO: 227); D235-AB1 (SEQ ID NO: 255) |
| 2 | D244-AD4 (SEQ ID NO: 259); D244-AB6 (SEQ ID NO: 283); D285-AA8 (SEQ ID |
| | NO: 2205); D285-AB9 (SEQ ID NO: 2206); D268-AE2 (SEQ ID NO: 279) |
| 3 | D100A-AC3 (SEQ ID NO: 177); D100A-BE2 (SEQ ID NO: 2209) |
| 4 | D205-BE9 (SEQ ID NO: 285); D205-BG9 (SEQ ID NO: 211); D205-AH4 (SEQ ID |
| | NO: 303) |
| 5 | D259-AB9 (SEQ ID NO: 269); D257-AE4 (SEQ ID NO: 277); D147-AD3 (SEQ ID |
| | NO: 203) |
| 6 | D249-AE8 (SEQ ID NO: 265); D-248-AA6 (SEQ ID NO: 263) |
| 7 | D233-AG7 (SEQ ID NO: 275); D224-BD11 (SEQ ID NO: 249); DAF10 |
| 8 | D105-AD6 (SEQ ID NO: 181); D215-AB5 (SEQ ID NO: 229); D135-AE1 (SEQ ID |
| | NO: 199) |
| 9 | D87A-AF3 (SEQ ID NO: 225), D210-BD4 (SEQ ID NO: 273) |
| 10 | D89-AB1 (SEQ ID NO: 159); D89-AD2 (SEQ ID NO: 161); D163-AG11 (SEQ ID |
| | NO: 207); D163-AF12 (SEQ ID NO: 205) |
| 11 | D267-AF10 (SEQ ID NO: 305); D96-AC2 (SEQ ID NO: 169); D96-AB6 (SEQ ID |
| | NO: 167); D207-AA5 (SEQ ID NO: 213); D207-AB4 (SEQ ID NO: 215); D207-AC4 (SEQ ID |
| | NO: 217) |
| 12 | D98-AG1 (SEQ ID NO: 173); D98-AA1 (SEQ ID NO: 171) |
| 13 | D209-AA12 (SEQ ID NO: 221); D209-AA11; D209-AH10 (SEQ ID NO: 223); D209- |
| | AH12 (SEQ ID NO: 241); D90A-BB3 (SEQ ID NO: 163) |
| 14 | D129-AD10 (SEQ ID NO: 197); D104A-AE8 (SEQ ID NO: 179) |
| 15 | D228-AH8 (SEQ ID NO: 253); D228-AD7 (SEQ ID NO: 251), D250-AC11 (SEQ ID |
| | NO: 267); D247-AH1 (SEQ ID NO: 261) |
| 16 | D128-AB7 (SEQ ID NO: 195); D243-AA2 (SEQ ID NO: 257); D125-AF11 (SEQ ID |
| | NO: 237) |
| 17 | D284-AH5 (SEQ ID NO: 307); D110-AF12 (SEQ ID NO: 185) |
| 18 | D221-BB8 (SEQ ID NO: 243) |
| 19 | D222-BH4 (SEQ ID NO: 245) |
| 20 | D134-AE11 (SEQ ID NO: 239) |
| 21 | D109-AH8 (SEQ ID NO: 183) |
| 22 | D136-AF4 (SEQ ID NO: 285) |
| 23 | D237-AD1 (SEQ ID NO: 235) |
| 24 | D112-AA5 (SEQ ID NO: 187) |
| 25 | D283-AC1 (SEQ ID NO: 281) |
| 26 | D110-AF12 (SEQ ID NO: 185) |

### EXAMPLE 13

### Nicotiana Cytochrome P450 Clones Lacking One or More of the Tobacco P450 Specific Domains

[0761] Four clones had high nucleic acid homology, ranging 90% to 99% nucleic acid homology, to other tobacco cytochrome genes reported in Table 6. The four clones included D136-AD5 (SEQ ID NO:292), D138-AD12 (SEQ ID NO:294), D243-AB3 (SEQ ID NO:298) and D250-AC11 (SEQ ID NO:300). However, due to a nucleotide frameshift, these genes did not contain one or more of three C-terminus cytochrome p450 domains and were excluded from identity groups presented in Table 6 or Table 7.

[0762] The amino acid identity of one clone, D95-AG1, did not contain the third domain, GXRXC (SEQ ID NO:2276), used to group p450 tobacco genes in Table 6 or Table 7. The nucleic acid sequence of this clone had low homology to other tobacco cytochrome genes and, therefore, this clone represents a novel group of cytochrome p450 genes in Nicotiana.

### EXAMPLE 14

### Use of Nicotiana Cytochrome P450 Fragments and Clones in Altered Regulation of Tobacco Qualities

[0763] The use of tobacco p450 nucleic acid fragments or whole genes are useful in identifying and selecting those plants that have altered tobacco phenotypes or tobacco constituents and, more importantly, altered metabolites. Transgenic tobacco plants are generated by a variety of transformation systems that incorporate nucleic acid fragments or full-length genes, selected from those reported herein, in orientations for either down-regulation, for example anti-sense orientation, or over-expression for example, sense orientation and the like. For over-expression to full-length genes, any nucleic acid sequence that encodes the entire or a functional part or amino acid sequence of the full-length genes described in this invention is desirable. Such nucleic acid sequences desirably are effective for increasing the expression of a certain enzyme and thus resulting in phenotypic effect within Nicotiana. Nicotiana lines that are homozygous are obtained through a series of backcrossing and assessed for phenotypic changes including, but not limited to, analysis of endogenous p450 RNA, transcripts, p450 expressed peptides and concentrations of plant metabolites using techniques commonly available to one having ordinary skill in the art. The changes exhibited in the tobacco plants provide information on the functional role of the selected gene of interest or are of use as preferred Nicotiana plant species.

### EXAMPLE 15

### Cloning of the Genomic Tobacco Nicotine Demethylase from Converter Burley Tobacco

[0764] Genomic DNA was extracted from converter Burley tobacco plant line 4407-33 (a Nicotiana tabacum variety 4407 line) using Qiagen Plant Easy kit as described in above Examples (see also the manufacturer's procedure).

[0765] The primers were designed based on the 5′ promoter and 3′ UTR region cloned in previous examples. The forward primers were 5′-GGC TCT AGA TAA ATC TCT TAA GTT ACT AGG TTC TAA-3′ (SEQ ID NO:2280) and 5′-TCT CTA AAG TCC CCT TCC-3′ (SEQ ID NO:2288) and the reverse primers were 5′-GGC TCT AGA AGT CAA TTA TCT TCT ACA AAC CTT TAT ATA TTA GC-3′ (SEQ ID NO:2281), and 5′-CCA GCA TTC CTC AAT TTC-3′ (SEQ ID NO:2289). PCR was applied to the 4407-33 genomic DNA with 100 μl of reaction mix. Pfx high fidelity enzyme was used for PCR amplification. The PCR product was visualized on 1% agarose gel after electrophoresis. A single band with molecular weight of approximately 3.5 kb was observed and excised from the gel. The resulting band was purified using a gel purification kit (Qiagen; based on manufacturer's procedure). The purified DNA was digested by enzyme Xba I (NEB; used according to the manufacturer's instructions). The pBluescript plasmid was digested by Xba I using same procedure. The fragment was gel purified and ligated to pBluescript plasmid. The ligation mix was transformed into competent cell GM1O9 and plated onto LB plate containing 100 mg/l of ampicillin with blue/white selection. The white colonies were picked and grown into 10 ml LB liquid media containing ampicillin. The DNA was extracted by miniprep. The plasmid DNA containing the insert was sequenced using a CEQ 2000 sequencer (Beckman, Fullerton, Calif.) based on the manufacturer's procedure. The T3 and T7 primers and 8 other internal primers were used for sequencing. The sequence was assembled and analyzed, thus providing the genomic sequence (SEQ ID NO:4; FIG. 3). Based on the genomic sequence, it was determined that the nicotine demethylase gene in both converter and nonconverter tobacco lines does not contain a transposable element.

[0766] Comparison of the sequence of SEQ ID NO:5 with the sequence of SEQ ID NO:4 allowed the determination of a single intron within the coding portion of the gene (identified as the sequence of SEQ ID NO:7; FIG. 5). As shown in FIG. 2, the genomic structure of the tobacco nicotine demethylase includes two exons flanking a single intron. The first exon spans nucleotides 2010 to 2949 of SEQ ID NO:4, which encodes amino acids 1-313 of SEQ ID NO:3, and the second exon spans nucleotides 3947 to 4562 of SEQ ID NO:4, which encode amino acids 314-517 of SEQ ID NO:3. Accordingly, the intron spans nucleotides 2950-3946 of SEQ ID NO:4. The intron sequence is provided in FIG. 5 and is that of SEQ ID NO:7. The translation product of the genomic DNA sequence is provided in FIG. 3 as the sequence of SEQ ID NO:3. The tobacco nicotine demethylase amino acid sequence contains an endoplasmic reticulum membrane anchoring motif.

### EXAMPLE 16

### Cloning 5′ Flanking Sequences (SEQ ID NO:8) and 3′UTR (SEQ ID NO:9) from Converter Tobacco

A. Isolation of Total DNA from Converter Tobacco Leaves Tissue

[0767] Genomic DNA was isolated from leaves of converter tobacco 4407-33. The isolation of DNA was performed using a DNeasy Plant Mini Kit from the company Qiagen, Inc. (Valencia, Calif.) according to the manufacturer's protocol. The manufacturer's manual Dneasy' Plant Mini and DNeasy Plant Maxi Handbook, Qiagen January 2004 is incorporated hereby as reference. The procedure for DNA preparation included the following steps: Tobacco leaf tissue (approximately 20 mg dry weight) was ground to a fine powder under liquid nitrogen for 1 minute. The tissue powder was transferred into a 1.5 ml tube. Buffer AP1 (400 μl) and 4 μl of RNase stock solution (100 mg/ml) were added to a maximum of 100 mg of ground leaf tissue and vortexed vigorously. The mixture was incubated for 10 min at 65° C. and mixed 2-3 times during incubation by inverting tube. Buffer AP2 (130 μl) was then added to the lysate. The mixture was mixed and incubated for 5 min on ice. The lysate was applied to a QIAshredder Mini Spin Column and centrifuged for 2 min (14,000 rpm). The flow-through fraction was transferred to a new tube without disturbing the cell-debris pellet. Buffer AP3/E (1.5 volumes) was then added to the cleared lysate and mixed by pipetting. The mixture (650 μl) from the preceding step including any precipitate was applied to a DNeasy Mini Spin Column. The mixture was centrifuged for 1 min at>6000×g (>8000 rpm) and the flow-through was discarded. This was repeated with the remaining sample and the flow-through and collection tube were discarded. DNeasy Mini Spin Column was placed in a new 2 ml collection tube. Then buffer AW (500 μl) was added to the DNeasy column and centrifuged for 1 min (>8000 rpm). The flow-through was discarded. The collection tube was reused in the next step. Buffer AW (500 μl) was then added to the DNeasy column and centrifuged for 2 min (>14,000 rpm) in order to dry the membrane. The DNeasy column was transferred to a 1.5 ml tube. Then Buffer AE (100 μl) was pipetted onto the DNeasy membrane. The mixture was incubated for 5 min at room temperature (15-25° C.) and then centrifuged for 1 min (>8000 rpm) to elute.

[0768] The quality and quantity of the DNA was estimated by running samples on an agarose gel.

B. Cloning of 5′ Flanking Sequences of the Structural Gene

[0769] A modified inverse PCR method was used to clone 750 nucleotides of the 5′ flanking sequences of the structural gene from SEQ ID NO:5. First, appropriate restriction enzymes were selected based on the restriction site in the known sequence fragment and the restriction sites distance downstream of the 5′ flanking sequences. Two primers were designed based on this known fragment. The forward primer was located downstream of the reverse primer. The reverse primer was located in the 3′ portion of the known fragment.

[0770] The cloning procedure included the following steps:

[0771] The purified genomic DNA (5 μg) was digested with 20-40 units of the appropriate restriction enzyme (EcoRI and SpeI) in a 50 μl reaction mixture. An agarose gel electrophoresis with a 1/10 volume of the reaction mixture was performed to determine if the DNA was digested to completion. A direct ligation was performed after thorough digestion by ligating overnight at 4° C. A reaction mixture of 200 μl containing 10 μl of digested DNA and 0.2 μl of T4 DNA ligase (NEB) was ligated overnight at 4° C. PCR on the ligation reaction was performed after an artificial small circular genome was obtained. PCR was performed with 10 μl of ligation reaction and 2 primers from known fragments in two different directions in 50 μl reaction mixture. A gradient PCR program with annealing temperatures of 45-56° C. was applied.

[0772] Agarose gel electrophoresis was performed to check the PCR reaction. The desired band was cut from the gel and a QIAquick gel purification Kit from QIAGEN was used to purify the band. The purified PCR fragments were ligated into a pGEM-T Easy Vector (Promega, Madison, Wis.) following manufacturer's instructions. The transformed DNA plasmids were extracted by miniprep using SV Miniprep kit (Promega, Madison, Wis.) following the manufacturer's instructions. Plasmid DNA containing the insert was sequenced using a CEQ 2000 sequencer (Beckman, Fullerton, Calif.). Approximately 758 nt (nucleotides 1241-2009 of SEQ ID NO:4) of the 5′ flanking sequence were cloned by the method described above.

C. Cloning of the Longer 5′ Flanking Sequences (SEQ ID NO:8; FIG. 6) of the Structural Gene

[0773] BD GenomeWalker Universal Kit (Clontech laboratories, Inc., PaloAlto, Calif.) was used for cloning additional 5′ flanking sequence of the structural gene, D121-AA8 according to the manufacturer's user manual. The manufacturer's manual BD GenomeWalker August, 2004 is incorporated hereby as reference. The size and purity of tobacco genomic DNA were tested by running samples on a 0.5% agarose gel. A total of 4 blunt-end reactions (DRA I, STU I, ECOR V, PVU II) were set up for tobacco 33 library genome walking construction. After purification of the digested DNAs, the digested genomic DNAs were ligated to the genome walker adaptor. Primary PCR reactions were applied to the four digested DNA's by using adaptor primer AP1 and the gene specific primer from D121-AA8 (CTCTATTGATACTAGCTGGTTTTGGAC; SEQ ID NO:2282). The primary PCR products were used directly as templates for the nested PCR. The adaptor nested primer provided by the kit and the nested primer from the known clone D121-AA8 (SEQ ID NO:5) (GGAGGGAGAGTATAACTTACGGATTC; SEQ ID NO:2283) were used in the PCR reaction. PCR products were checked by running gel electrophoreses. The desired bands were sliced out from the gel, and the PCR fragments were purified using QIAquick gel purification Kit from QIAGEN. The purified PCR fragments were ligated into a pGEM-T Easy Vector (Promega, Madison, Wis.) following manufacturer's instructions. The transformed DNA plasmids were extracted by miniprep using the SV Miniprep kit (Promega, Madison, Wis.) and following the manufacturer's instructions. Plasmid DNA containing the insert was sequenced using a CEQ 2000 sequencer (Beckman, Fullerton, Calif.). Another approximately 853 nt of the 5′ flan king sequence, including nucleotides 399-1240 of SEQ ID NO:4, were cloned by the method described above.

[0774] A second round of the genome walking was performed according to the same method with the difference that the following primers GWR1A (5′-AGTAACCGATTGCTCACGTTATCCTC-3′) (SEQ ID NO:2284) and GWR2A (5′-CTCTATTCAACCCCACACGTAACTG-3′) (SEQ ID NO:2285) were used. Another approximately 398 nt of flanking sequence, including nucleotides 1-398 of SEQ ID NO:4, were cloned by this method.

[0775] A search for regulatory elements revealed that, in addition to “TATA” box, “CAAT” boxes, and “GAGA” boxes, several MYB-like recognition sites and organ specificity elements are present in the tobacco nicotine demethylase promoter region. Putative elicitor responsive elements and nitrogen-regulated elements, identified using standard methods, are also present in the promoter region.

D. Cloning of 3′ Flanking Sequences of the Structural Gene

[0776] BD GenomeWalker Universal Kit (Clontech laboratories, Inc., PaloAlto, Calif.) was used for cloning of 3′ flanking sequence of the structural gene, D121-AA8 according to the manufacturer's user manual. The cloning procedure is the same as describes in the preceding Section C of this example, except for the gene specific primers. The first primer was designed from close to the end of D121-AA8 structural gene (5′-CTA AAC TCT GGT CTG ATC CTG ATA CTT-3′) (SEQ ID NO:2286). The nested primer was designed further downstream of primer 1 of the D121-AA8 structural gene (CTA TAC GTA AGG TAA ATC CTG TGG AAC) (SEQ ID NO:2287). The final PCR products were checked by gel electrophoreses. The desired bands were excised from the gel. The PCR fragments were purified using QIAquick gel purification Kit from QIAGEN. The purified PCR fragments were ligated into a pGEM-T Easy Vector (Promega, Madison, Wis.) following manufacturer's instructions. The transformed DNA plasmids were extracted by miniprep using SV Miniprep kit (Promega, Madison, Wis.) following manufacturer's instructions. Plasmid DNA containing the insert was sequenced using a CEQ 2000 sequencer (Beckman, Fullerton, Calif.). Approximately 1617 nucleotides of additional 3′ flanking sequence (nucleotides 4731-6347 of SEQ ID NO:4) were cloned by the method described above. The nucleic acid sequence of the 3′UTR region is shown in FIG. 7.

### EXAMPLE 17

### Screening the Nicotiana Genus for the Presence or Absence of a Nicotine Demehtylase Gene

[0777] Forty-three Nicotiana species, forty-nine Nicotiana rustica lines, and approximately six hundred Nicotiana tabacum lines were seeded in pots and the resulting plants were grown in the greenhouse as shown in Table 8 below.

TABLE 8

| Scientific Name or Common Name | |
|---|---|
| or Source | Inventory Number |
| Nicotiana africana | TW6 |
| Nicotiana amplexicaulis | TW10 |
| Nicotiana arentsii | TW12 |
| Nicotiana attenuata | TW13 |
| Nicotiana benavidesii | TW15 |
| Nicotiana benthamiana | TW16 |
| Nicotiana bigelovii | TW18 |
| Nicotiana bonariensis | TW28 |
| Nicotiana clevelandii | TW30 |
| Nicotiana corymbosa | TW35 |
| Nicotiana debneyi | TW36 |
| Nicotiana excelsior | TW46 |
| Nicotiana exigua | TW48 |
| Nicotiana glauca | TW53 |
| Nicotiana glutinosa | TW58 |
| Nicotiana goodspeedii | TW67 |
| Nicotiana gossei | TW68 |
| Nicotiana hesperis | TW69 |
| Nicotiana ingulba | TW71 |
| Nicotiana kawakamii | TW72 |
| Nicotiana knightiana | TW73 |
| Nicotiana maritima | TW82 |
| Nicotiana megalosiphon | TW83 |
| Nicotiana miersii | TW85 |
| Nicotiana nesophila | TW87 |
| Nicotiana noctiflora | TW88 |
| Nicotiana nudicaulis | TW90 |
| Nicotiana otophora | TW94 |
| Nicotiana palmeri | TW98 |
| Nicotiana paniculata | TW99 |
| Nicotiana petunioides | TW105 |
| Nicotiana plumbaginifolia | TW106 |
| Nicotiana repanda | TW110 |
| Nicotiana rosulata | TW112 |
| Nicotiana rotundifolia | TW114 |
| Nicotiana rustica | TW116 |
| Nicotiana setchelli | TW121 |
| Nicotiana solanifolia | TW123 |
| Nicotiana stocktonii | TW126 |
| Nicotiana eastii | TW127 |
| Nicotiana suaveolens | TW128 |
| Nicotiana thrysiflora | TW139 |
| Nicotiana tomentosa | TW140 |
| Nicotiana tomentosiformis | TW142 |
| Nicotiana trigonophylla | TW143 |
| Nicotiana undulata | TW145 |
| 4384-HHS | TR1 |
| 43103-5 | TR10 |
| 43104-1 | TR11 |
| 4401 | TR12 |
| Brasilia #7 | TR13 |
| Brasilia #23 | TR14 |
| Brasilia Selvaggio | TR15 |
| Brasilia | TR16 |
| Erbasanta | TR17 |
| 68 Olson | TR18 |
| C 39-193 | TR19 |
| 4385 L-5-6 | TR2 |
| German #2 | TR20 |
| German #1 | TR21 |
| Mahorka #1 | TR22 |
| Mahorka #2 | TR23 |
| Mahorka #3 | TR24 |
| Mahorka #4 | TR25 |
| Mahorka #5 | TR26 |
| Mahorka #6 | TR27 |
| Mahorka #7 | TR28 |
| Mahorka #8 | TR29 |
| 4386 L-5-6 | TR3 |
| Mahorka #9 | TR30 |
| Mahorka #10 | TR31 |
| Mahorka #11 | TR32 |
| Mahorka #12 | TR33 |
| Kostoff | TR34 |
| Bak #46 | TR35 |
| Koriotes | TR36 |
| Jainkaya Sol. | TR37 |
| Jainkaya bl | TR38 |
| Drosqi | TR39 |
| 4390 L-5-2-1 | TR4 |
| 14 No.23057 | TR40 |
| Edinburg 25 | TR41 |
| Ja.Bot.Car. | TR42 |
| R.Bot.Car. | TR43 |
| HARBIN | TR44 |
| Normal | TR45 |
| Matsui | TR46 |
| Buni | TR47 |
| DUMONT | TR48 |
| Chinensis | TR49 |
| 4398 L-5-2-1 | TR5 |
| Campanulata | TR50 |
| Acutifolia | TR51 |
| Fructicosa | TR52 |
| Acutifolia | TR53 |
| Nordugel | TR54 |
| GC-1 | TR55 |
| Hasankeyf | TR56 |
| PNE 241-5 | TR57 |
| PNE 362-4 | TR58 |
| PNE 369-3 | TR59 |
| 4399 L-5-2-1 | TR6 |
| PNE 373-13 | TR60 |
| PNE 407-5 | TR61 |
| PNE 412-8 | TR62 |
| PNE 417-4 | TR63 |
| PNE 418-6 | TR64 |
| PNE 420-6 | TR65 |
| PNE 427-4 | TR66 |
| TI 1674 | TR67 |
| TI 1685 | TR68 |
| TI 1686 | TR69 |
| 43054 | TR7 |
| TI 1693 | TR70 |
| Rustica | TR71 |
| Rustica | TR72 |
| Rustica | TR73 |
| Rustica | TR74 |
| Rustica | TR75 |
| Rustica | TR76 |
| Rustica | TR77 |
| Selection from PI499194 | TR78 |
| Selection from PI499200 | TR79 |
| 43101 | TR8 |
| Selection from PI499206 | TR80 |
| 93024 | TR81 |
| Rustica | TR82 |
| Florida 301 | TC195 |
| DF 300 | TC465 |
| Mos Res Black Mammoth | TC481 |
| Tom Rossen (TR) Madole | TC486 |
| MS KY 16 | TC521 |
| NC-BMR 42 | TC570 |
| N. tabacum KDH-926 | TC575 |
| N. tabacum KDH-959 | TC576 |
| N. tabacum KDH-960 | TC577 |
| Nance | TC616 |
| TN D94 | TC621 |
| Burley Mammoth KY16 | TC12 |
| Ex. 12 | TC13 |
| Golden Burley | TC14 |
| GR 2 | TC15 |
| GR 5 | TC16 |
| GR 6 | TC17 |
| GR 13 | TC21 |
| KY153 | TC216 |
| KY157 | TC217 |
| KY163 | TC219 |
| GR 14 | TC22 |
| KY165 | TC220 |
| Little Sweet Orinoco | TC221 |
| Little Yellow | TC222 |
| Madole (NN) | TC223 |
| One Sucker | TC224 |
| Virginia 312 | TC228 |
| GR 17 | TC23 |
| GR 18 | TC25 |
| GR 19 | TC26 |
| GR 36 | TC28 |
| GR 38 | TC29 |
| GR 38A | TC30 |
| GR 40 | TC31 |
| GR 42 | TC32 |
| GR 42C | TC33 |
| GR 43 | TC34 |
| GR 44 | TC35 |
| GR 45 | TC36 |
| GR 53 | TC39 |
| Greenbrior | TC40 |
| H-47 | TC42 |
| Harouova | TC43 |
| Harrow 12 | TC44 |
| Harrow Velvet | TC45 |
| Aurelius | TC459 |
| Harwill | TC46 |
| Black Mammoth | TC460 |
| Browleaf | TC462 |
| D-534-A-1 | TC464 |
| DF 516 | TC467 |
| DF 911 | TC468 |
| HI Burley 21 | TC47 |
| Improved Madole | TC471 |
| Jernigan's Madole | TC472 |
| Kentucky 151 | TC473 |
| Little Crittenden | TC476 |
| Lizard Tail Orinoco | TC477 |
| Improved Brior | TC48 |
| Mos Res (MR/NN) Madole | TC480 |
| Mos Res Little Crittenden | TC482 |
| Mos Res Little Wood | TC483 |
| Narrow Leaf (NL) Madole | TC484 |
| Sears Special | TC485 |
| VA 310 | TC487 |
| Walkers Broadleaf | TC489 |
| Judy's Pride | TC49 |
| Woods | TC490 |
| Baur | TC491 |
| Bel MS-1 | TC492 |
| Bel MS-2 | TC493 |
| Catterton | TC494 |
| Dean | TC495 |
| Gertz | TC496 |
| Keller | TC497 |
| Maryland 10 | TC498 |
| Maryland 14 D2 | TC499 |
| Kelly Brownleaf | TC50 |
| Maryland 21 | TC500 |
| Maryland 59 | TC501 |
| Maryland 64 | TC502 |
| Maryland 201 | TC503 |
| Maryland 341 | TC504 |
| Maryland Stand-Up Mammoth | TC508 |
| MD B100 | TC509 |
| Kelly Burley | TC51 |
| Moore | TC511 |
| Posey | TC512 |
| Robinson Med Broadleaf | TC513 |
| Sweeney | TC514 |
| Thompson | TC515 |
| Ward | TC516 |
| Wilson | TC517 |
| MS 400 | TC518 |
| MS 402 | TC519 |
| KY1 | TC52 |
| MS Burley1 | TC520 |
| MS PA Swarr Hibshman | TC523 |
| SB 400 | TC524 |
| SB Burley 1 | TC526 |
| K5 | TC53 |
| Samsun | TC536 |
| Samsun (PHYB)-1 | TC537 |
| Samsun (PHYB)-2 | TC538 |
| KY9 | TC54 |
| Samsun Holmes (NN) | TC540 |
| Samsun NO 15 | TC541 |
| Samsun-BLK SHK Tol | TC542 |
| Smyrna | TC543 |
| Smyrna NO 9 | TC544 |
| Smyrna NO 23 | TC545 |
| Smyrna-BLK SHK Tol | TC546 |
| Stanimaka NO 20 | TC547 |
| Turkish | TC548 |
| Xanthi (Mitchell-Mor) | TC549 |
| Xanthi (Smith) | TC550 |
| Xanthi Yaka NO 18A | TC552 |
| Xanthi-Parental | TC554 |
| Perique | TC556 |
| KY12 | TC56 |
| VA 309 | TC560 |
| VA 409 | TC562 |
| KYBSS | TC565 |
| NC-BMR 90 | TC571 |
| KDH-926 | TC575 |
| KDH-926 | TC575 |
| KDH-959 | TC576 |
| KDH-959 | TC576 |
| KDH-960 | TC577 |
| C8 | TC578 |
| VA 331 | TC592 |
| Smith TO 448A | TC594 |
| LN KY 171 | TC605 |
| SI KY 171 | TC607 |
| SI KY 160 | TC608 |
| KY19 | TC61 |
| IG KY 171 | TC610 |
| IG KY 160 | TC611 |
| PY KY 160 | TC612 |
| PY KY 171 | TC613 |
| Shirey | TC617 |
| TN D950 | TC622 |
| VA 355 | TC638 |
| VA 359 | TC639 |
| OS 802 | TC640 |
| Black Mammoth SM Stalk | TC641 |
| Elliot Madole | TC643 |
| Goose Creek Red | TC644 |
| Little Wood | TC645 |
| KY56 | TC72 |
| KY57 | TC73 |
| KY58 | TC74 |
| Uniform | TC83 |
| Warner | TC86 |
| Yellow Twist Bud | TC88 |
| Venezuela | TI106 |
| N. tabacum Hoja parado (Galpoa) | TI1068 |
| Argentina | TI1068 |
| Peru | TI1075 |
| Turkey | TI1217 |
| Turkey | TI1218 |
| Turkey | TI1219 |
| Turkey | TI1222 |
| Turkey | TI1223 |
| Turkey | TI1224 |
| Turkey | TI1225 |
| Turkey | TI1229 |
| Turkey | TI1230 |
| Turkey | TI1235 |
| Turkey | TI1236 |
| Turkey | TI1237 |
| Spain | TI1239 |
| Spain | TI1245 |
| Spain | TI1246 |
| Spain | TI1247 |
| Spain | TI1250 |
| Spain | TI1251 |
| Spain | TI1253 |
| Yugoslavia | TI1254 |
| Paraguay | TI1255 |
| Ethiopia | TI1268 |
| Ethiopia | TI1269 |
| Ethiopia | TI1270 |
| Ethiopia | TI1271 |
| Korea, South | TI1278 |
| Brazil | TI128 |
| Korea, South | TI1280 |
| Yugoslavia | TI1282 |
| Yugoslavia | TI1283 |
| Yugoslavia | TI1284 |
| Yugoslavia | TI1285 |
| Yugoslavia | TI1286 |
| Yugoslavia | TI1287 |
| Brazil | TI129 |
| Yugoslavia | TI1291 |
| Yugoslavia | TI1292 |
| Yugoslavia | TI1293 |
| Yugoslavia | TI1295 |
| Yugoslavia | TI1296 |
| Yugoslavia | TI1297 |
| Bolivia | TI1301 |
| Bolivia | TI1302 |
| Argentina | TI1306 |
| Papua New Guinea | TI1311 |
| Greece | TI1313 |
| New Zealand | TI1315 |
| New Zealand | TI1317 |
| New Zealand | TI1318 |
| Yugoslavia | TI1320 |
| Yugoslavia | TI1321 |
| Yugoslavia | TI1322 |
| Yugoslavia | TI1324 |
| Yugoslavia | TI1325 |
| Yugoslavia | TI1326 |
| Yugoslavia | TI1327 |
| Yugoslavia | TI1329 |
| Yugoslavia | TI1332 |
| Yugoslavia | TI1333 |
| Austria | TI1349 |
| Cuba | TI1373 |
| Cuba | TI1375 |
| Cuba | TI1376 |
| Bulgaria | TI1378 |
| Bulgaria | TI1379 |
| Bulgaria | TI1380 |
| Bulgaria | TI1380 |
| Bulgaria | TI1381 |
| Bulgaria | TI1382 |
| Bulgaria | TI1383 |
| Bulgaria | TI1384 |
| Bulgaria | TI1385 |
| Bulgaria | TI1386 |
| Bulgaria | TI1387 |
| Bulgaria | TI1388 |
| Bulgaria | TI1389 |
| Bulgaria | TI1407 |
| Bulgaria | TI1408 |
| Bulgaria | TI1409 |
| Bulgaria | TI1410 |
| Bulgaria | TI1411 |
| Bulgaria | TI1412 |
| Italy | TI1414 |
| Liberia | TI1426 |
| Liberia | TI1427 |
| Poland | TI1444 |
| Cuba | TI1452 |
| Cuba | TI1453 |
| Brazil | TI1455 |
| Germany | TI1459 |
| Germany | TI1460 |
| Spain | TI1485 |
| Bulgaria | TI1492 |
| Bulgaria | TI1493 |
| Bulgaria | TI1494 |
| Bulgaria | TI1496 |
| Switzerland | TI1506 |
| Australia | TI1507 |
| Australia | TI1508 |
| Germany | TI1532 |
| Germany | TI1533 |
| Belgium | TI1534 |
| Belgium | TI1535 |
| Austria | TI1536 |
| Italy | TI1538 |
| Iran | TI1555 |
| Iran | TI1556 |
| United States | TI1561 |
| United States | TI1562 |
| United States | TI1563 |
| Poland | TI1567 |
| Poland | TI1568 |
| Poland | TI1569 |
| Poland | TI1570 |
| Japan | TI158 |
| Japan | TI1594 |
| Italy | TI1595 |
| Italy | TI1596 |
| Italy | TI1599 |
| Italy | TI1600 |
| Italy | TI1601 |
| Italy | TI1602 |
| Rhodesia | TI1603 |
| Japan | TI1604 |
| Japan | TI1605 |
| Yugoslavia | TI1623 |
| United States | TI186 |
| United States | TI187 |
| United States | TI240 |
| United States | TI241 |
| United States | TI271 |
| Colombia | TI291 |
| United States | TI331 |
| Romania | TI380 |
| Romania | TI381 |
| United States | TI395 |
| United States | TI396 |
| United States | TI444 |
| United States | TI480 |
| United States | TI484 |
| United States | TI486 |
| United States | TI532 |
| United States | TI538 |
| Colombia | TI540 |
| Colombia | TI541 |
| Honduras | TI567 |
| Honduras | TI568 |
| Ecuador | TI569 |
| Algeria | TI69 |
| Honduras | TI706 |
| Iran | TI73 |
| Venezuela | TI776 |
| Former Soviet Union | TI86 |
| Former Soviet Union | TI87 |
| Former Soviet Union | TI88 |
| Former Soviet Union | TI90 |
| Former Soviet Union | TI92 |
| Former Soviet Union | TI93 |
| Former Soviet Union | TI94 |
| Brazil | TI97 |
| Brazil | TI975 |
| | TI1007 |
| | TI1025 |
| | TI1026 |
| Tabaco Corriente | TI105 |
| Ambireno | TI1050 |
| Cuba | TI1061 |
| Lampazo | TI1067 |
| Hoja Parado (Galpao) | TI1068 |
| Judi Pride Bertel | TI1075 |
| Americano Tracuateua | TI108 |
| Guayabito | TI1080 |
| Crillo Saltono | TI1082 |
| Crillo Saltono | TI1083 |
| Chileno Colorado, Hoja Anjosta | TI1085 |
| Chileno Grande Colorado | TI1095 |
| Creja De Mula | TI1119 |
| Chinese X Amarellinho | TI1143 |
| Cubano De La Sierra | TI115 |
| | TI119 |
| | TI1211 |
| | TI1215 |
| | TI1277 |
| | TI1288 |
| Begej | TI1331 |
| Fodya | TI1350 |
| | TI1352 |
| Oxviz | TI1356 |
| Kulsko | TI1380 |
| Tekne | TI1388 |
| Nuk | TI1397 |
| Amarillo Rio Grande Do Sul | TI14 |
| Guacharo U.S.A. | TI1473 |
| | TI1482 |
| | TI1484 |
| Rippel | TI1498 |
| Amarelao | TI1499 |
| Immune 580 MS | TI1501 |
| W.K. 39 | TI1502 |
| Sirone | TI1508 |
| Espado | TI151 |
| Simmaba | TI152 |
| Russian Burley | TI1534 |
| Vorstenladen | TI1541 |
| Selesion Olor | TI1543 |
| NF 2617 | TI1550 |
| NFC 2 | TI1551 |
| Kutsaga E-1 | TI1552 |
| CH T.Z. 273-3B | TI1556 |
| Beinhart 1000-1 | TI1561 |
| Lonibow | TI1573 |
| A17 | TI1574 |
| A22 | TI1575 |
| A23 | TI1576 |
| Parado | TI1583 |
| Quin Diaz | TI1585 |
| Ke-Shin No. 1 | TI1592 |
| BT 101 | TI1594 |
| Shiroenshu 201 | TI1604 |
| Higo | TI161 |
| Lonibow | TI1613 |
| Little Gold 1025 | TI1618 |
| MA-Song-Ta | TI1619 |
| Nanbu | TI162 |
| Tan-Yuh-1 | TI1620 |
| Veliki Hercegovac | TI1623 |
| (S.P.I. 27525) | TI178 |
| Cordoba | TI198 |
| Virginia | TI220 |
| Virginia | TI222 |
| No. 3 | TI230 |
| Cordoba | TI255 |
| Cordoba | TI257 |
| Cordoba | TI260 |
| Cordoba | TI268 |
| Cubano | TI295 |
| | TI301 |
| Hoja Ancha | TI309 |
| | TI312 |
| Chocoa | TI313 |
| Palmira | TI318 |
| Cubano | TI323 |
| | TI341 |
| | TI343 |
| | TI350 |
| | TI382 |
| Zapatoca | TI384 |
| Tachuleo | TI385 |
| Arcial Chico | TI394 |
| | TI407 |
| Copan | TI421 |
| Virginia | TI424 |
| | TI429 |
| Tachuelo | TI432 |
| Cordoncillo | TI438 |
| Repello and Bravo Negro | TI445 |
| | TI447 |
| Costillo Nigro, Blanco, Pina | TI450 |
| Hubana and Palmira | TI476 |
| Colorado | TI508 |
| | TI510 |
| | TI514 |
| Chaco Chivo | TI515 |
| Kentucky | TI527 |
| | TI528 |
| Tabaco Blanco | TI530 |
| | TI554 |
| Cacho Do Chivo | TI560 |
| Dolores De Copan | TI562 |
| Barbasco | TI578 |
| | TI582 |
| | TI592 |
| | TI596 |
| | TI606 |
| | TI629 |
| Blanco, Colorado | TI630 |
| Tlapacoyan | TI645 |
| | TI657 |
| | TI661 |
| Oja-De-Vastago | TI665 |
| Chanchamayo | TI687 |
| Daule | TI691 |
| | TI717 |
| Amarillo Riogrande | TI74 |
| Monte Libano | TI764 |
| | TI785 |
| Virginia | TI789 |
| | TI792 |
| Cacerio De Songoy | TI794 |
| Gumo | TI797 |
| | TI822 |
| Negro or Salom | TI870 |
| Capadare and Rabo De Gallo | TI889 |
| | TI946 |
| Rabo De Gallo | TI955 |
| Virginia Bright | TI964 |
| KY171(ph_) | 04GH#105-1 |
| KY171(ph_) | 04GH#105-2 |
| KY171(ph_) | 04GH#105-3 |
| KY171(ph_) | 04GH#105-4 |
| KY171(ph_) | 04GH#105-5 |
| KY171(ph_) | 04GH#105-6 |
| KY171(ph_) | 04GH#107-1 |
| KY171(ph_) | 04GH#107-2 |
| KY171(ph_) | 04GH#107-3 |
| KY171(ph_) | 04GH#107-4 |
| KY171(ph_) | 04GH#107-5 |
| KY171(ph_) | 04GH#107-6 |
| NL.Madole (ph_) | 04GH#114-1 |
| NL.Madole (ph_) | 04GH#114-2 |
| NL.Madole (ph_) | 04GH#114-3 |
| NL.Madole (ph_) | 04GH#114-4 |
| NL.Madole (ph_) | 04GH#114-5 |
| NL.Madole (ph_) | 04GH#114-6 |
| NL.Madole (ph_) | 04GH#115-1 |
| NL.Madole (ph_) | 04GH#115-2 |
| NL.Madole (ph_) | 04GH#115-3 |
| NL.Madole (ph_) | 04GH#115-4 |
| NL.Madole (ph_) | 04GH#115-5 |
| NL.Madole (ph_) | 04GH#115-6 |
| TN D950 (ph_) | 04GH#124-1 |
| TN D950 (ph_) | 04GH#124-2 |
| TN D950 (ph_) | 04GH#124-3 |
| TN D950 (ph_) | 04GH#124-4 |
| TN D950 (ph_) | 04GH#124-5 |
| TN D950 (ph_) | 04GH#124-6 |
| TN D950 (ph_) | 04GH#125-1 |
| TN D950 (ph_) | 04GH#125-2 |
| TN D950 (ph_) | 04GH#125-3 |
| TN D950 (ph_) | 04GH#125-4 |
| TN D950 (ph_) | 04GH#125-5 |
| TN D950 (ph_) | 04GH#125-6 |
| Basma(PhPh) | 04GH#68 |
| KY14 | 86-00-K-7-1 |

[0778] Leaf samples were taken from six-week-old plants. DNA extractions from the leaves were performed using DNeasy Plant Mini Kit (Qiagen, Inc., Valencia, Calif.) according to manufacturer's protocol.

[0779] The primers were designed based on the 5′ promoter and 3′ UTR regions described herein. The forward primer was 5′-GGC TCT AGA TAA ATC TCT TAA GTT ACT AGG TTC TAA-3′ (SEQ ID NO:2290) and the reverse primer was 5′-GGC TCT AGA AGT CAA TTA TCT TCT ACA AAC CTT TAT ATA TTA GC-3′ (SEQ ID NO:2291) (from −750 of the 5′ flanking region to 180 nt 3′ UTR). Genomic DNA extracted from all above-mentioned Nicotiana lines was used for the PCR analysis. A 100 μl reaction mixture and the Pfx high fidelity enzyme were used for PCR amplification. The annealing temperature used was 54° C. due to less homology among the species (this temperature is 2° C. lower than the temperature used for cloning genomic sequence from 4407 converter tobacco as described above). The PCR product was visualized on 0.8% agarose gel after electrophoresis. A single band with molecular weight of approximately 3.5 kb was either present or absent on the gel. The lines with a positive band were scored as having the target gene. For the lines that lacked positive bands, four additional PCR reactions were performed using four more sets of primers. These sets of primers were selected from different regions of the gene. The four sets primers were:

[0780] (1) from the start codon (5′-GCC CAT CCT ACA GTT ACC TAT AAA AAG GAA G-3′) (SEQ ID NO:2292) to the stop codon (5′-ACC AAG ATG AAA GAT CTT AGG TTT TAA-3′) (SEQ ID NO:2293),

[0781] (2) from 570 nt downstream of the start codon (5′-CTG ATC GTG AAG ATG A-3′) (SEQ ID NO:2294)to the end of the intron (5′-TGC TGC ATC CAA GAC CA-3′) (SEQ ID NO:2295),

[0782] (3) from 300 nt downstream of the beginning of the intron (5′-GGG CTA TAT GGA TTC GC-3′)(SEQ ID NO:2296) to the end of the intron (5′-TGC TGC ATC CAA GAC CA-3′) (SEQ ID NO:2295), and

[0783] (4) from 300 nt downstream of the beginning of the intron (5′-GGG CTA TAT GGA TTC GC-3′) (SEQ ID NO:2296) to the 3′UTR (5′-AGT CAA TTA TCT TCT ACA AAC CTT TAT ATA TTA GC-3′) (SEQ ID NO:2195).

[0784] If the five above-mentioned PCR reactions all showed no correct bands, the line was scored as lacking the target gene. Examples of the genomic DNA quantity and PCR products for the target nicotine demethylase gene are depicted in FIGS. 8 and 9.

[0785] Germplasm identified as lacking the nicotine demethylase gene is used as source material for breeding with cultivated tobaccos. However, any nucleic acid sequence shown in FIGS. 1, 3 to 7, 10 to 158, 162 to 170, 172-1 to 172-19, and 173-1 to 173-294, or a fragment thereof, can be used in a similar manner. Interspecific or intraspecific hybridization methods combined with standard breeding methods, such as backcrossing or the pedigree method, may be used to transfer the aberrant or absent nicotine demethylase gene or any nucleic acid sequence shown in FIGS. 1, 3 to 7, 10 to 158, 162 to 170, 172-1 to 172-19, and 173-1 to 173-294, or a fragment thereof, from the donor source to cultivated tobaccos. Results of screening experiments for nicotine demethylase are set forth in Table 9 below. A line negative for nicotine demethylase may be bred with itself or another negative line (e.g., Nicotiana africana×Nicotiana africana or Nicotiana africana×Nicotiana amplexicaulis or any suitable breeding combination). Negative lines are also bred with any commercial variety of tobacco according to standard tobacco breeding techniques known in the art. Tobacco lines may be bred with any other compatible plant according to standard procedures in the art.

TABLE 9
Exemplary Results from Screening the Nicotiana Genus
for the Nicotine Demethylase Gene

| Scientific Name or | Inventory | Screening |
|---|---|---|
| Common Name or (Origin) | Number | Results |
| Nicotiana africana | TW6 | Negative |
| Nicotiana amplexicaulis | TW10 | Negative |
| Nicotiana arentsii | TW12 | Negative |
| Nicotiana benthamiana | TW16 | Negative |
| Nicotiana bigelovii | TW18 | Negative |
| Nicotiana corymbosa | TW35 | Negative |
| Nicotiana debneyi | TW36 | Negative |
| Nicotiana excelsior | TW46 | Negative |
| Nicotiana exigua | TW48 | Negative |
| Nicotiana glutinosa | TW58 | Negative |
| Nicotiana goodspeedii | TW67 | Negative |
| Nicotiana gossei | TW68 | Negative |
| Nicotiana hesperis | TW69 | Negative |
| Nicotiana ingulba | TW71 | Negative |
| Nicotiana knightiana | TW73 | Negative |
| Nicotiana maritima | TW82 | Negative |
| Nicotiana megalosiphon | TW83 | Negative |
| Nicotiana miersii | TW85 | Negative |
| Nicotiana nesophila | TW87 | Negative |
| Nicotiana noctiflora | TW88 | Negative |
| Nicotiana nudicaulis | TW90 | Negative |
| Nicotiana otophora | TW94 | Positive |
| Nicotiana palmeri | TW98 | Negative |
| Nicotiana paniculata | TW99 | Negative |
| Nicotiana petunioides | TW105 | Negative |
| Nicotiana plumbaginifolia | TW106 | Negative |
| Nicotiana repanda | TW110 | Negative |
| Nicotiana rosulata | TW112 | Negative |
| Nicotiana rotundifolia | TW114 | Negative |
| Nicotiana rustica | TW116 | Negative |
| Nicotiana setchelli | TW121 | Negative |
| Nicotiana stocktonii | TW126 | Negative |
| Nicotiana eastii | TW127 | Negative |
| Nicotiana suaveolens | TW128 | Negative |
| Nicotiana thrysiflora | TW139 | Positive |
| Nicotiana tomentosa | TW140 | Positive |
| Nicotiana tomentosiformis | TW142 | Positive |
| Nicotiana trigonophylla | TW143 | Negative |
| NL Madole | Foundation seed | Positive |
| KY 14 | Foundation seed | Positive |
| TN 86 | Foundation seed | Positive |
| Coker 176 | Foundation seed | Positive |
| KY21 | TC62 | Positive |
| KY22 | TC63 | Positive |
| KY24 | TC64 | Positive |
| KY26 | TC65 | Positive |
| KY33 | TC66 | Positive |
| KY34 | TC67 | Positive |
| KY35 | TC68 | Positive |
| KY41A | TC69 | Positive |
| KY54 | TC71 | Positive |
| KY52 | TC70 | Positive |
| Virginia 528 | TC85 | Positive |
| Virginia B-29 | TC86 | Positive |
| 401 Cherry Red | TC227 | Positive |
| 401 Cherry Red Free | TC228 | Positive |
| KY170 | TC474 | Positive |
| KY171 | TC475 | Positive |
| Maryland 609 | TC505 | Positive |
| Maryland Mammoth | TC507 | Positive |
| VA403 | TC580 | Positive |
| KY908 | TC630 | Positive |
| Earl Jennett Madole | TC642 | Positive |
| Kavala | TC533 | Positive |
| Kavala No 15A | TC534 | Positive |
| GR 10 | TC 19 | Positive |
| GR 10A | TC20 | Positive |
| GR 24 | TC27 | Positive |
| NOD 9 | TI 1745 | Positive |
| NOD 12 | TI 1747 | Positive |
| NOD 17 | TI 1749 | Positive |
| 80111 Pudawski 66CMS | TI 1661 | Positive |
| 84160 Pudawski 66 | TI 1683 | Positive |
| MII 109 | TI 1715 | Positive |
| Mississippi Heirloom | TI 1716 | Positive |
| Ovens 62 | TI 1741 | Positive |
| BT 101 | TI 1594 | Positive |
| Kentucky MI 429 | TI 1595 | Positive |
| Shiroenshu 201 | TI 1604 | Positive |
| Shiroenshu 202 | TI 1605 | Positive |
| Ostrolist 2747 II | TI 1568 | Positive |
| Ergo | TI 1349 | Positive |
| Burley 323 | TI 1535 | Positive |
| Russian Burley | TI 1534 | Positive |
| Puremozhetz 83 | TI 1569 | Positive |
| Bulsunov 80 | TI 1537 | Positive |
| Amarillo Riogrande | TI74 | Positive |
| Espado | TI151 | Positive |
| Crillo Saltono | TI1082 | Positive |
| Kutsaga E-1 | TI1552 | Positive |
| Beinhart 1000-1 | TI1561 | Positive |
| Kelly Brownleaf | TC50 | Positive |
| KY9 | TC54 | Positive |
| Black Mammoth | TC460 | Positive |
| Lizard Tail Orinoco | TC477 | Positive |
| Bel MS-2 | TC493 | Positive |
| Maryland 201 | TC503 | Positive |
| Perique | TC556 | Positive |
| NC-BMR 90 | TC571 | Positive |
| LN KY 171 | TC605 | Positive |
| Samsun | TC536 | Positive |
| Xanthi-Parental | TC554 | Positive |
| (Turkey) | TI 1222 | Positive |
| Hongrois (Spain) | TI 1246 | Positive |
| (Ethiopia) | TI 1269 | Positive |
| Ravajk(Yugoslavia) | TI 1284 | Positive |
| (Bolivia) | TI 1301 | Positive |
| Adjuctifolia (New Zealand) | TI 1317 | Positive |
| NO. 6055 (Cuba) | TI 1375 | Positive |
| (Bulgaria) | TI 1386 | Positive |
| Grande Reditto (Italy) | TI 1414 | Positive |
| (Germany) | TI 1459 | Positive |
| (Switzerland) | TI 1506 | Positive |
| Sirone (Australia) | TI 1508 | Positive |
| Dubek 566 (Poland) | TI 1567 | Positive |
| Kagoshima Maruba (Japan) | TI 158 | Positive |
| Erzegovina Lecce MI 411 | TI 1602 | Positive |
| (Italy) | | |
| (Colombia) | TI 291 | Positive |
| Okso (Former Soviet Union) | TI 86 | Positive |

### EXAMPLE 18

### Creating or Generating Mutations and Screening for Genetic Variation in the Nicotine Demethylase Gene

[0786] Preexisting genetic variation or mutations in the sequence coding for the nicotine demethylase or any other genes represented by a nucleic acid sequence shown in FIGS. 1, 3 to 7, 10 to 158, 162 to 170, 172-1 to 172-19, and 173-1 to 173-294, or a fragment ther screened using molecular technologies including targeted induced local lesions in genomes (TILLING), DNA fingerprinting methods such as amplified fragment length polymorphisms (AFLP), and single nucleotide polymorphisms (SNP). In practice, plant populations representing preexisting genetic variation such as a transgenic plant (e.g., any of those described herein) or those created by exposing reproductive tissues, seed, or other plant tissues to chemical mutagens such as alkylating agents, ethane methyl sulfonate (EMS) for example, or to radiation such as x-rays or gamma rays are used. For mutagenized populations the dosage of the mutagenic chemical or radiation is determined experimentally for each type of plant tissue such that a mutation frequency is obtained that is below a threshold level characterized by lethality or reproductive sterility. The number of M1 generation seed or the size of M1 plant populations resulting from the mutagenic treatments are estimated based upon the expected frequency of mutations. The progeny, M2 generation, of the M1 plants represent the population that desirably is evaluated for a mutation in a gene, e.g., the nicotine demethylase gene.

[0787] Tilling, DNA fingerprinting, SNP or similar technologies may be used to detect induced or naturally-occurring genetic variation in a desirable gene such as the nicotine demethylase gene. The variation may result from deletions, substitutions, point mutations, translocations, inversions, duplications, insertions or complete null mutations. These technologies could be used in a marker-assisted selection (MA breeding program) to transfer or breed the null or dissimilar alleles of the nicotine demthylase gene or any nucleic acid sequence shown in FIGS. 1, 3 to 7, 10 to 158, 162 to 170, 172-1 to 172-19, and 173-1 to 173-294, or a fragment thereof, into other tobaccos. A breeder could create segregating populations from hybridizations of a genotype containing the null or dissimilar allele with an agronomically desirable genotype. Plants in the F2 or backcross generations could be screened using a marker developed from the nicotine demethylase sequence or a nucleic acid sequence shown in FIGS. 1, 3 to 7, 10 to 158, 162 to 170, 172-1 to 172-19, and 173-1 to 173-294, or a fragment thereof, using one of the techniques listed previously. Plants identified as possessing the null or dissimilar alleles could be backcrossed or self-pollinated to create the next population that could be screened. Depending on the expected inheritance pattern or the MAS technology used, it may be necessary to self-pollinate the selected plants before each cycle of backcrossing to aid identification of the desired individual plants. Backcrossing or other breeding procedure can be repeated until the desired phenotype of the recurrent parent is recovered.

### EXAMPLE 19

### Breeding or Transfer of Variant Nictoine Demethylase Gene Expression Into Cultivated Tobacco

A. Selection of Parental Lines

[0788] Donor tobacco lines are identified as those having variant nicotine demethylase gene expression (e.g., a tobacco line identified using a PCR-based strategy as lacking the nicotine demethylase gene or is null for nicotine demethylase or expressing a nicotine demethylase having altered enzymatic activity; or a tobacco line expressing a transgene that alters or silences gene expression is also considered to be variant for nicotine demethylase gene expression) or variants of any nucleic acid sequence shown in FIGS. 1, 3 to 7, 10 to 158, 162 to 170, 172-1 to 172-19, and 173-1 to 173-294, or a fragment thereof, and are selected to serve as the donor parent. Such plants are generated according to standard methods known in the art, e.g., those described herein. Other donor plants include tobacco plants that have been mutagenized and subsequently identified as having variant nicotine demethylase gene activity or variant activity of a gene product encoded by any nucleic acid sequence shown in FIGS. 1, 3 to 7, 10 to 158, 162 to 170, 172-1 to 172-19, and 173-1 to 173-294, or a fragment thereof. One exemplary donor parent is the ne tobacco line, Nicotiana rustica.

[0789] The recipient tobacco line is typically any commercial tobacco variety such as Nicotiana tabacum TN 90. Other useful Nicotiana tabacum varieties include BU 64, CC 101, CC 200, CC 27, CC 301, CC 400, CC 500, CC 600, CC 700, CC 800, CC 900, Coker 176, Coker 319, Coker 371 Gold, Coker 48, CU 263, DF911, Galpao tobacco, GL 26H, GL 350, GL 737, GL 939, GL 973, HB 04P, K 149, K 326, K 346, K 358, K 394, K 399, K 730, KT 200, KY 10, KY 14, KY 160, KY 17, KY 171, KY 907, KY 160, Little Crittenden, McNair 373, McNair 944, msKY 14×L8, Narrow Leaf Madole, NC 100, NC 102, NC 2000, NC 291, NC 297, NC 299, NC 3, NC 4, NC 5, NC 6, NC 606, NC 71, NC 72, NC 810, NC BH 129, OXFORD 207, ‘Perique’ tobacco, PVH03, PVH09, PVH19, PVH50, PVH51, R 610, R 630, R 7-11, R 7-12, RG 17, RG 81, RG H4, RG H51, RGH 4, RGH 51, RS 1410, SP 168, SP 172, SP 179, SP 210, SP 220, SP G-28, SP G-70, SP H20, SP NF3, TN 86, TN 97, TN D94, TN D950, TR (Tom Rosson) Madole, VA 309, VA 309, or VA 359. Seed from such varieties may also be from a source resulting from screening for the lack or presence of nicotine conversion using standard chemical or molecular methods. Such commercial varieties also provide material for altering nicotine demethylase activity according to the methods described herein. Other null lines and recipient or donor lines known in the art are also useful, and lines identified as being dissimilar from the nicotine demethylase gene described herein also serve as a donor parent. Recipient lines may also be chosen from any tobacco varieties for flue-cured, Burley, dark, Virginia or Oriental tobaccos. Table 10 shows exemplary Nicotiana species which exhibit breeding compatibility with Nicotiana tabacum (see also, for example, Compendium of Tobacco Diseases published by APS or The Genus Nicotiana Illustrated published by Japan Tobacco Inc.).

TABLE 10
Exemplary Nicotiana species compatible with Nicotiana tabacum.

| Scientific Name or Common | Inventory | PI | |
|---|---|---|---|
| Name or (Origin) | Number | Number | Screening Results |
| Nicotiana amplexicaulis | TW10 | PI 271989 | Negative |
| Nicotiana benthamiana | TW16 | PI 555478 | Negative |
| Nicotiana bigelovii | TW18 | PI 555485 | Negative |
| Nicotiana debneyi | TW36 | | Negative |
| Nicotiana excelsior | TW46 | PI 224063 | Negative |
| Nicotiana glutinosa | TW58 | PI 555507 | Negative |
| Nicotiana goodspeedii | TW67 | PI 241012 | Negative |
| Nicotiana gossei | TW68 | PI 230953 | Negative |
| Nicotiana hesperis | TW69 | PI 271991 | Negative |
| Nicotiana knightiana | TW73 | PI 555527 | Negative |
| Nicotiana maritima | TW82 | PI 555535 | Negative |
| Nicotiana megalosiphon | TW83 | PI 555536 | Negative |
| Nicotiana nudicaulis | TW90 | PI 555540 | Negative |
| Nicotiana paniculata | TW99 | PI 555545 | Negative |
| Nicotiana plumbaginifolia | TW106 | PI 555548 | Negative |
| Nicotiana repanda | TW110 | PI 555552 | Negative |
| Nicotiana rustica | TW116 | | Negative |
| Nicotiana suaveolens | TW128 | PI 230960 | Negative |
| Nicotiana sylvestris | TW136 | PI 555569 | Negative |
| Nicotiana tomentosa | TW140 | PI 266379 | Positive |
| Nicotiana tomentosiformis | TW142 | | Positive |
| Nicotiana trigonophylla | TW143 | PI 555572 | Negative |

B. Gene Transfer

[0790] The donor parent is crossed or hybridized in a reciprocal manner with the donor parent according to standard beeding methods. Successful hybridizations, identified according to standard method, yield F1 plants that are fertile or that are, if desired, backcrossed with the recipient parent. A plant population in the F2 generation, derived from the F1 plant, is screened for variant nicotine demethylase gene expression (e.g., a plant is identified that fails to express nicotine demethylase due to the absence of the nicotine demethylase gene according to standard methods, for example, by using a PCR method with primers based upon the nucleotide sequence information for nicotine demethylase described herein) or variant expression of any nucleic acid sequence shown in FIGS. 1, 3 to 7, 10 to 158, 162 to 170, 172-1 to 172-19, and 173-1 to 173-294, or a fragment thereof. Alternatively, any standard screening method known in the art for evaluating plant alkaloid content is used to identify plants that do not convert nicotine to nornicotine. Selected plants are then hybridized with the recipient parent and the first backcrossed (BC1) generation plants are self-pollinated to produce a BC1F2 population that is again screened for variant nicotine demethylase gene expression (e.g., the null version of the nicotine demethylase gene). The process of backcrossing, self-pollination, and screening is repeated, for example, at least 4 times until the final screening produces a plant that is fertile and reasonably similar to the recipient parent. This plant, if desired, is self-pollinated and the progeny are subsequently screened again to confirm that the plant exhibits variant nicotine demethylase gene expression (e.g., a plant that displays the null condition for nicotine demethylase) or variant expression of any nucleic acid sequence shown in FIGS. 1, 3 to 7, 10 to 158, 162 to 170, 172-1 to 172-19, and 173-1 to 173-294, or a fragment thereof. Cytogenetic analyses of the selected plants is optionally performed to confirm the chromosome complement and chromosome pairing relationships. Breeder's seed of the selected plant is produced using standard methods including, for example, field testing, confirmation of the null condition for nicotine demethylase or null or increased condition of a polypeptide encoded by any nucleic acid sequence shown in FIGS. 1, 3 to 7, 10 to 158, 162 to 170, 172-1 to 172-19, and 173-1 to 173-294, or a fragment thereof, and chemical analyses of cured leaf to determine the level of alkaloids especially the nornicotine content and the ratio nornicotine/nicotine+nornicotine or other such desired properties provided by those gene sequences found in any nucleic acid sequence shown in FIGS. 1, 3 to 7, 10 to 158, 162 to 170, 172-1 to 172-19, and 173-1 to 173-294, or a fragment thereof.

[0791] In situations where the original F1 hybrid resulting from the cross between the recipient (e.g., N. rustica) and donor parent (e.g., TN 90) is hybridized or backcrossed to the donor (e,g., TN 90), the progeny of this backcross is self-pollinated to create a BC1F2 generation that is screened for the null or dissimilar version of nicotine demethylase or the null or increased condition of a polypeptide encoded by any nucleic acid sequence shown in FIGS. 1, 3 to 7, 10 to 158, 162 to 170, 172-1 to 172-19, and 173-1 to 173-294, or a fragment thereof. The remainder of the breeding effort is as described in the above paragraph.

C. Agronomic Performance Testing and Confirmation of Phenotype

[0792] Lines resulting from the breeding and screening for variant nicotine demethylase gene expression (e.g., the null condition for nicotine demethylase) or of any nucleic acid sequence shown in FIGS. 1, 3 to 7, 10 to 158, 162 to 170, 172-1 to 172-19, and 173-1 to 173-294, or a fragment thereof, are evaluated in the field using standard field procedures. Control genotypes including the original recipient parent (e.g., TN 90) are included and entries are arranged in the filed in a randomized complete block design or other appropriate field design. Standard agronomic practices for tobacco are used, for example, the tobacco is harvested, weighed, and sampled for chemical and other common testing before and during curing. Statistical analyses of the data are performed to confirm the similarity of the selected lines to the recipient, e.g., the parental line TN 90.

### EXAMPLE 20

### Breeding or Transfer of a Modified Attribute Into Cultivated Tobacco

[0793] Expression of any of the genes described herein, for example, any one of those nucleic acid sequences shown in FIG. 1, FIGS. 3 to 7, FIGS. 10 to 158, FIGS. 162 to 170, FIGS. 172-1 to 172-19, and FIGS. 173-1 to 173-294 may also be modified according to the methods described herein. Such genes provide a basis for modifying a plant's phenotype, for example, improving flavor or aroma or both, improving an organoleptic property, or improving curability. Plants identified as having a modified phenotype are then used in a breeding protocol according to standard methods known in the art, for example, those described herein.

### EXAMPLE 21

### Hybrid Plant Generation

[0794] Application of standard protoplast culture methodologies developed for production of hybrid plants using protoplast fusion is also useful for generating plants having variant gene expression (e.g., variant nicotine demethylase gene expression). Accordingly, protoplasts are generated from a first and a second tobacco plant having variant gene expression. Calli are cultured from successful protoplast fusions and plants are then regenerated. Resulting progeny hybrid plants are identified and selected for variant gene expression according to standard methods and, if desired, may be used in any standard breeding protocol.

[0795] WO 03/078577, WO 2004/035745, PCT/US/2004/034218, and PCT/US/2004/034065, and all other references, patents, patent application publications, and patent applications referred to herein are incorporated by reference herein to the same extent as if each of these references, patents, patent application publications, and patent applications were separately incorporated by reference herein.

[0796] Numerous modifications and variations in practice of the invention are expected to occur to those skilled in the art upon consideration of the foregoing detailed description of the invention. Consequently, such modifications and variations are intended to be included within the scope of the following claims.

What is claimed is:

1. A breeding method for producing a tobacco plant having decreased expression of a nicotine demethylase gene, said method comprising the steps of:
(a) providing a first tobacco plant having variant nicotine demethylase gene expression;
(b) providing a second tobacco plant that contains at least one phenotypic trait;
(c) crossing said first tobacco plant with said second tobacco plant to produce an F1 progeny plant;
(d) collecting seed of said F1 progeny for said variant nicotine demethylase gene expression; and
(e) germinating said seed to produce a tobacco plant having decreased expression of a nicotine demethylase gene.

2. The method of claim 1, wherein said first tobacco plant comprises an endogenous nicotine demethylase gene having a mutation.

3. The method of claim 2, wherein said first tobacco plant comprises a mutation is a deletion, substitution, point mutation, translocation, inversion, duplication, or an insertion.

4. The method of claim 1, wherein said first tobacco plant comprises a nicotine demethylase gene having a null mutation.

5. The method of claim 1, wherein said first tobacco plant comprises a recombinant gene that silences an endogenous nicotine demethylase gene.

6. The method of claim 1, wherein said first tobacco plant comprises a nicotine demethylase having reduced or altered enzymatic activity.

7. The method of claim 1, wherein said first tobacco plant is a transgenic plant.

8. The method of claim 1, wherein said first tobacco plant comprises Nicotiana africana, Nicotiana amplexicaulis, Nicotiana arentsii, Nicotiana benthamiana, Nicotiana bigelovii, Nicotiana corymbosa, Nicotiana debneyi, Nicotiana excelsior, Nicotiana exigua, Nicotiana glutinosa, Nicotiana goodspeedii, Nicotiana gossei, Nicotiana hesperis, Nicotiana ingulba, Nicotiana knightiana, Nicotiana maritima, Nicotiana megalosiphon, Nicotiana miersii, Nicotiana nesophila, Nicotiana noctiflora, Nicotiana nudicaulis, Nicotiana otophora, Nicotiana palmeri, Nicotiana paniculata, Nicotiana petunioides, Nicotiana plumbaginifolia, Nicotiana repanda, Nicotiana rosulata, Nicotiana rotundifolia, Nicotiana rustica, Nicotiana setchelli, Nicotiana stocktonii, Nicotiana eastii, Nicotiana suaveolens or Nicotiana trigonophylla.

9. The method of claim 8, wherein said first tobacco plant comprises Nicotiana amplexicaulis, Nicotiana benthamiana, Nicotiana bigelovii, Nicotiana debneyi, Nicotiana excelsior, Nicotiana glutinosa, Nicotiana goodspeedii, Nicotiana gossei, Nicotiana hesperis, Nicotiana knightiana, Nicotiana maritima, Nicotiana megalosiphon, Nicotiana nudicaulis, Nicotiana paniculata, Nicotiana plumbaginifolia, Nicotiana repanda, Nicotiana rustica, Nicotiana suaveolens or Nicotiana trigonophylla.

10. The method of claim 1, wherein said first tobacco plant is Nicotiana tabacum.

11. The method of claim 1, wherein said first tobacco plant is an Oriental, a dark tobacco, flue or air-cured tobacco, Virginia or a Burley tobacco plant.

12. The method of claim 1, wherein said second tobacco plant is Nicotiana tabacum.

13. The method of claim 11, wherein said Nicotiana tabacum is BU 64, CC 101, CC 200, CC 27, CC 301, CC 400, CC 500, CC 600, CC 700, CC 800, CC 900, Coker 176, Coker 319, Coker 371 Gold, Coker 48, CU 263, DF911, Galpao tobacco, GL 26H, GL 350, GL 737, GL 939, GL 973, HB04P, K 149, K 326, K 346, K 358, K 394, K 399, K 730, KT 200, KY 10, KY 14, KY 160, KY 17, KY 171, KY 907, KY 160, Little Crittenden, McNair 373, McNair 944, msKY 14×L8, Narrow Leaf Madole, NC 100, NC 102, NC 2000, NC 291, NC 297, NC 299, NC 3, NC 4, NC 5, NC 6, NC 606, NC 71, NC 72, NC 810, NC BH 129, OXFORD 207, ‘Perique’ tobacco, PVH03, PVH09, PVH19, PVH50, PVH51, R 610, R 630, R 7-11, R 7-12, RG 17, RG 81, RG H4, RG H51, RGH 4, RGH 51, RS 1410, SP 168, SP 172, SP 179, SP 210, SP 220, SP G-28, SP G-70, SP H20, SP NF3, TN 86, TN 90, TN 97, TN D94, TN D950, TR (Tom Rosson) Madole, VA 309, VA 309, or VA 359.

14. The method of claim 1, wherein said second tobacco plant is an Oriental, a dark tobacco, flue or air-cured tobacco, Virginia or a Burley tobacco plant.

15. A method of any of claim 1, wherein said phenotypic trait comprises disease resistance; high yield; high grade index; curability; curing quality; mechanical harvestability; holding ability; leaf quality; height; maturation; stalk size; or leaf number per plant.

16. The method of claim 1, further comprising pollinating a male sterile or a male sterile hybrid with the plant of step (b).

17. The method of claim 1, further comprising backcrossing or pollinating plants produced from germinated seed of step (e).

18. A method of breeding a nicotine demethylase deficiency trait into a tobacco plant, said method comprising the steps of:
a) crossing a first tobacco plant having variant nicotine demethylase gene expression with a second tobacco plant;
b) producing progeny tobacco plants of the cross;
c) extracting a DNA sample from progeny tobacco plants;
d) contacting the DNA sample with a marker nucleic acid molecule that hybridizes to a nicotine demethylase gene or fragment thereof; and
e) performing a marker assisted breeding method for the variant nicotine demethylase gene expression trait.

19. The method of claim 18, wherein said marker assisted breeding method comprises utilizing an amplified fragment length polymorphism, restriction fragment length polymorphism, random amplified polymorphism display, single nucleotide polymorphism, a microsatellite marker, or targeted induced local lesion in a tobacco genome.

20. A method of producing tobacco seed, comprising crossing any one of the tobacco plants selected from the group consisting of Nicotiana africana, Nicotiana amplexicaulis, Nicotiana arentsii, Nicotiana benthamiana, Nicotiana bigelovii, Nicotiana corymbosa, Nicotiana debneyi, Nicotiana excelsior, Nicotiana exigua, Nicotiana glutinosa, Nicotiana goodspeedii, Nicotiana gossei, Nicotiana hesperis, Nicotiana ingulba, Nicotiana knightiana, Nicotiana maritima, Nicotiana megalosiphon, Nicotiana miersii, Nicotiana nesophila, Nicotiana noctiflora, Nicotiana nudicaulis, Nicotiana otophora, Nicotiana palmeri, Nicotiana paniculata, Nicotiana petunioides, Nicotiana plumbaginifolia, Nicotiana repanda, Nicotiana rosulata, Nicotiana rotundifolia, Nicotiana rustica, Nicotiana setchelli, Nicotiana stocktonii, Nicotiana eastii, Nicotiana suaveolens, and Nicotiana trigonophylla with itself or with a second, distinct tobacco.

21. The method of claim 20, comprising a method of preparing hybrid tobacco seed, comprising crossing the first tobacco plant having variant nicotine demethylase gene expression to the second, distinct tobacco plant.

22. The method of claim 21, wherein crossing comprises the steps of:
(a) planting a seed of the cross resulting from the tobacco plant having variant nicotine demethylase gene expression and a second, distinct tobacco plant;
(b) growing tobacco plants from said seed until said plants bear flowers;
(c) pollinating a flower of the tobacco plant having variant nicotine demethylase gene expression with pollen from said second tobacco plant or pollinating a flower of said second tobacco plant with pollen from the plant of the tobacco plant having variant nicotine demethylase gene expression; and
(d) harvesting seed resulting from said pollinating.

23. A method for developing a tobacco plant in a tobacco breeding program comprising:
(a) providing a tobacco plant, or its components, having variant nicotine demethylase gene expression; and
(b) employing said plant or components as a source of breeding material using tobacco plant breeding techniques.

24. The method of claim 23, wherein the plant breeding techniques comprise bulk selection, backcrossing, self-pollination, introgression, pedigree selection, pureline selection, haploid/doubled haploid breeding, or single seed descent.

25. A tobacco plant or components thereof, wherein said plant is produced according to any one of claims 1, 18, 20, or 23.

26. A tissue culture of regenerable tobacco cells obtained from any one of the plants produced according to any one of claims 1, 18, 20, or 23, wherein the tissue culture regenerates tobacco plants capable of expressing all the physiological and morphological characteristics of the tobacco plant having variant nicotine demethylase gene expression.

27. The tissue culture of claim 26, wherein the regenerable cells are embryos, meristematic cells, seeds, pollen, leaves, roots, root tips, or flowers or are protoplasts or callus derived therefrom.

28. A method of producing a tobacco product comprising: (a) providing a tobacco plant produced according to any one of claims 1, 18, 20, or 23; and (b) preparing a tobacco product from said tobacco plant.

29. The method of claim 28, wherein said tobacco product is a cured leaf or stem.

30. The method of claim 28, wherein said tobacco product is a smokeless tobacco product.

31. The tobacco product of claim 28, wherein said tobacco product is a moist or dry snuff, a chewing tobacco, a cigarette product, a cigar product, a cigarillo, a pipe tobacco, or bidis.

32. A breeding method for producing a tobacco plant having a modified attribute, said method comprising the steps of:
(a) providing a first tobacco plant having a modified attribute comprising variant gene expression of a nucleic acid molecule selected from the group consisting of the nucleic acid sequences shown in FIG. 1, FIGS. 3 to 7, FIGS. 10 to 158, FIGS. 162 to 170, FIGS. 172-1 to 172-19, and FIGS. 173-1 to 173-294;
(b) providing a second tobacco plant that contains at least one phenotypic trait;
(c) crossing said first tobacco plant with said second tobacco plant to produce an F1 progeny plant;
(d) collecting seed of said F1 progeny for said modified attribute; and
(e) germinating said seed to produce a tobacco plant having said modified attribute.

33. The method of claim 32, wherein said first tobacco plant comprises an endogenous nucleic acid molecule selected from the group consisting of the nucleic acid sequences shown in FIG. 1, FIGS. 3 to 7, FIGS. 10 to 158, FIGS. 162 to 170, FIGS. 172-1 to 172-19, and FIGS. 173-1 to 173-294, wherein said nucleic acid comprises a mutation.

34. The method of claim 33, wherein said first tobacco plant comprises a mutation is a deletion, substitution, point mutation, translocation, inversion, duplication, or an insertion.

35. The method of claim 32, wherein said first tobacco plant comprises an endogenous nucleic acid molecule selected from the group consisting of the nucleic acid sequences shown in FIG. 1, FIGS. 3 to 7, FIGS. 10 to 158, FIGS. 162 to 170, FIGS. 172-1 to 172-19, and FIGS. 173-1 to 173-294, said nucleic acid comprises a null mutation.

36. The method of claim 32, wherein said first tobacco plant comprises a recombinant gene that silences expression of endogenous nucleic acid molecule an endogenous nucleic acid molecule selected from the group consisting of the nucleic acid sequences shown in FIG. 1, FIGS. 3 to 7, FIGS. 10 to 158, FIGS. 162 to 170, FIGS. 172-1 to 172-19, and FIGS. 173-1 to 173-294.

37. The method of claim 32, wherein said first tobacco plant comprises an endogenous nucleic acid molecule selected from the group consisting of the nucleic acid sequences shown in FIG. 1, FIGS. 3 to 7, FIGS. 10 to 158, FIGS. 162 to 170, FIGS. 172-1 to 172-19, and FIGS. 173-1 to 173-294, wherein said nucleic acid molecule encodes a polypeptide having reduced or altered enzymatic activity.

38. The method of claim 32, wherein said first tobacco plant is a transgenic plant.

39. The method of claim 32, wherein said first tobacco plant comprises Nicotiana africana, Nicotiana amplexicaulis, Nicotiana arentsii, Nicotiana benthamiana, Nicotiana bigelovii, Nicotiana corymbosa, Nicotiana debneyi, Nicotiana excelsior, Nicotiana exigua, Nicotiana glutinosa, Nicotiana goodspeedii, Nicotiana gossei, Nicotiana hesperis, Nicotiana ingulba, Nicotiana knightiana, Nicotiana maritima, Nicotiana megalosiphon, Nicotiana miersii, Nicotiana nesophila, Nicotiana noctiflora, Nicotiana nudicaulis, Nicotiana otophora, Nicotiana palmeri, Nicotiana paniculata, Nicotiana petunioides, Nicotiana plumbaginifolia, Nicotiana repanda, Nicotiana rosulata, Nicotiana rotundifolia, Nicotiana rustica, Nicotiana setchelli, Nicotiana stocktonii, Nicotiana eastii, Nicotiana suaveolens, or Nicotiana trigonophylla.

40. The method of claim 32, wherein said first tobacco plant is Nicotiana tabacum.

41. The method of claim 32, wherein said first tobacco plant is an Oriental, a dark tobacco, flue or air-cured tobacco, Virginia or a Burley tobacco plant.

42. The method of claim 32, wherein said second tobacco plant is Nicotiana tabacum.

43. The method of claim 32, wherein said Nicotiana tabacum is BU 64, CC 101, CC 200, CC 27, CC 301, CC 400, CC 500, CC 600, CC 700, CC 800, CC 900, Coker 176, Coker 319, Coker 371 Gold, Coker 48, CU 263, DF911, Galpao tobacco, GL 26H, GL 350, GL 737, GL 939, GL 973, HB 04P, K 149, K 326, K 346, K 358, K 394, K 399, K 730, KT 200, KY 10, KY 14, KY 160, KY 17, KY 171, KY 907, KY 160, Little Crittenden, McNair 373, McNair 944, msKY 14×L8, Narrow Leaf Madole, NC 100, NC 102, NC 2000, NC 291, NC 297, NC 299, NC 3, NC 4, NC 5, NC 6, NC 606, NC 71, NC 72, NC 810, NC BH 129, OXFORD 207, ‘Perique’ tobacco, PVH03, PVH09, PVH19, PVH50, PVH51, R 610, R 630, R 7-11, R 7-12, RG 17, RG 81, RG H4, RG H51, RGH 4, RGH 51, RS 1410, SP 168, SP 172, SP 179, SP 210, SP 220, SP G-28, SP G-70, SP H20, SP NF3, TN 86, TN 90, TN 97, TN D94, TN D950, TR (Tom Rosson) Madole, VA 309, VA 309, or VA 359.

44. The method of claim 32, wherein said first tobacco plant is an Oriental, a dark tobacco, flue or air-cured tobacco, Virginia or a Burley tobacco plant.

45. A method of any of claim 32, wherein said phenotypic trait comprises disease resistance; high yield; high grade index; curability; curing quality; mechanical harvestability; holding ability; leaf quality; height, plant maturation; stalk size; or leaf number per plant.

46. The method of claim 32, further comprising pollinating a male sterile or a male sterile hybrid with the plant of step (b).

47. The method of claim 32, further comprising backcrossing or pollinating plants produced from germinated seed of step (e).

48. A method of breeding an attribute into a tobacco plant, said method comprising the steps of:
a) crossing a first tobacco plant having a modified attribute comprising variant gene expression of a nucleic acid molecule selected from the group consisting of the nucleic acid sequences shown in FIG. 1, FIGS. 3 to 7, FIGS. 10 to 158, FIGS. 162 to 170, FIGS. 172-1 to 172-19, and FIGS. 173-1 to 173-294 with a second tobacco plant;
b) producing progeny tobacco plants of the cross;
c) extracting a DNA sample from progeny tobacco plants;
d) contacting the DNA sample with a marker nucleic acid molecule that hybridizes to a nucleic acid sequence shown in FIG. 1, FIGS. 3 to 7, FIGS. 10 to 158, FIGS. 162 to 170, FIGS. 172-1 to 172-19, and FIGS. 173-1 to 173-294 or a fragment thereof; and
e) performing a marker assisted breeding method for the modified attribute.

49. The method of claim 48, wherein said marker assisted breeding method comprises utilizing an amplified fragment length polymorphism, restriction fragment length polymorphism, random amplified polymorphism display, single nucleotide polymorphism, a microsatellite marker, or targeted induced local lesion in a tobacco genome.

50. A method of producing tobacco seed, comprising crossing a first tobacco plant selected from the group consisting of Nicotiana africana, Nicotiana amplexicaulis, Nicotiana arentsii, Nicotiana benthamiana, Nicotiana bigelovii, Nicotiana corymbosa, Nicotiana debneyi, Nicotiana excelsior, Nicotiana exigua, Nicotiana glutinosa, Nicotiana goodspeedii, Nicotiana gossei, Nicotiana hesperis, Nicotiana ingulba, Nicotiana knightiana, Nicotiana maritima, Nicotiana megalosiphon, Nicotiana miersii, Nicotiana nesophila, Nicotiana noctiflora, Nicotiana nudicaulis, Nicotiana otophora, Nicotiana palmeri, Nicotiana paniculata, Nicotiana petunioides, Nicotiana plumbaginifolia, Nicotiana repanda, Nicotiana rosulata, Nicotiana rotundifolia, Nicotiana rustica, Nicotiana setchelli, Nicotiana stocktonii, Nicotiana eastii, and Nicotiana suaveolens with a second tobacco plant having a modified attribute comprising variant gene expression of a nucleic acid molecule selected from the group consisting of the nucleic acid sequences shown in FIG. 1, FIGS. 3 to 7, FIGS. 10 to 158, FIGS. 162 to 170, FIGS. 172-1 to 172-19, and FIGS. 173-1 to 173-294.

51. The method of claim 50, wherein said second tobacco plant is Nicotiana tabacum.

52. The method of claim 51, wherein said Nicotiana tabacum is BU 64, CC 101, CC 200, CC 27, CC 301, CC 400, CC 500, CC 600, CC 700, CC 800, CC 900, Coker 176, Coker 319, Coker 371 Gold, Coker 48, CU 263, DF911, Galpao tobacco, GL 26H, GL 350, GL 737, GL 939, GL 973, HB 04P, K 149, K 326, K 346, K 358, K 394, K 399, K 730, KT 200, KY 10, KY 14, KY 160, KY 17, KY 171, KY 907, KY 160, Little Crittenden, McNair 373, McNair 944, msKY 14×L8, Narrow Leaf Madole, NC 100, NC 102, NC 2000, NC 291, NC 297, NC 299, NC 3, NC 4, NC 5, NC 6, NC 606, NC 71, NC 72, NC 810, NC BH 129, OXFORD 207, ‘Perique’ tobacco, PVH03, PVH09, PVH19, PVH50, PVH51, R 610, R 630, R 7-11, R 7-12, RG 17, RG 81, RG H4, RG H51, RGH 4, RGH 51, RS 1410, SP 168, SP 172, SP 179, SP 210, SP 220, SP G-28, SP G-70, SP H20, SP NF3, TN 86, TN 90, TN 97, TN D94, TN D950, TR (Tom Rosson) Madole, VA 309, VA 309, or VA 359.

53. The method of claim 51, wherein crossing comprises the steps of:
(a) planting a seed of the cross resulting from the tobacco plant having the modified attribute and a second, distinct tobacco plant;
(b) growing tobacco plants from said seed until said plants bear flowers;
(c) pollinating a flower of the tobacco plant having a modified attribute with pollen from said second tobacco plant or pollinating a flower of said second tobacco plant with pollen from the plant of the tobacco plant having said modified attribute; and
(d) harvesting seed resulting from said pollinating.

54. A method for developing a tobacco plant in a tobacco breeding program comprising:
(a) providing a tobacco plant, or its components, having a modified attribute comprising variant gene expression of a nucleic acid molecule selected from the group consisting of the nucleic acid sequences shown in FIG. 1, FIGS. 3 to 7, FIGS. 10 to 158, FIGS. 162 to 170, FIGS. 172-1 to 172-19, and FIGS. 173-1 to 173-294; and
(b) employing said plant or components as a source of breeding material using tobacco plant breeding techniques.

55. The method of claim 54, wherein the plant breeding techniques comprise bulk selection, backcrossing, self-pollination, introgression, pedigree selection, pureline selection, haploid/doubled haploid breeding, or single seed descent.

56. A tobacco plant or components thereof, wherein said plant is produced according to any one of claims 32, 48, or 54.

57. A tissue culture of regenerable tobacco cells obtained from any one of the plants produced according to any one of claims 32, 48, 50, or 54, wherein the tissue culture regenerates tobacco plants capable of expressing all the physiological and morphological characteristics of the tobacco plant having a modified attribute.

58. The tissue culture of claim 57, wherein the regenerable cells are embryos, meristematic cells, seeds, pollen, leaves, roots, root tips, or flowers or are protoplasts or callus derived therefrom.

59. A method of producing a tobacco product comprising: (a) providing a tobacco plant produced according to any one of claims 32, 48, 50, or 54; and (b) preparing a tobacco product from said tobacco plant.

60. The method of claim 59, wherein said tobacco product is a cured leaf or stem.

61. The method of claim 59, wherein said tobacco product is a smokeless tobacco product.

62. The tobacco product of claim 59, wherein said tobacco product is a moist or dry snuff, a chewing tobacco, a cigarette product, a cigar product, a cigarillo, a pipe tobacco, or bidis.

63. An isolated genetic marker comprising a nucleic acid sequence that is substantially identical to a nucleic acid sequence selected from the group consisting of the nucleic acid sequences shown in FIG. 1, FIGS. 3 to 7, FIGS. 10 to 158, FIGS. 162 to 170, FIGS. 172-1 to 172-19, and FIGS. 173-1 to 173-294.

64. The isolated genetic marker of claim 63, wherein said nucleic acid sequence is at least 70% identical to a nucleic acid sequence selected from the group consisting of the nucleic acid sequences shown in FIG. 1, FIGS. 3 to 7, FIGS. 10 to 158, FIGS. 162 to 170, FIGS. 172-1 to 172-19, and FIGS. 173-1 to 173-294.

65. The isolated genetic marker of claim 63, wherein said nucleic acid sequence comprises a sequence that hybridizes under stringent conditions to the complement of a nucleic acid sequence selected from the group consisting of the nucleic acid sequences shown in FIG. 1, FIGS. 3 to 7, FIGS. 10 to 158, FIGS. 162 to 170, FIGS. 172-1 to 172-19, and FIGS. 173-1 to 173-294.

66. The isolated genetic marker of claim 63, wherein said nucleic acid sequence is constitutive, or ethylene or senescence induced.

67. The isolated genetic marker of claim 63, wherein said nucleic acid sequence encodes a polypeptide that is substantially identical to an amino acid sequence selected from the group consisting of the amino acid sequences shown in FIG. 1, FIGS. 3 and 4, FIGS. 10 to 158, FIGS. 160A to 160E, FIGS. 162 to 170, and FIGS. 172-1 to 172-19.

68. The isolated genetic marker of claim 63, wherein said nucleic acid sequence is operably linked to a heterologous gene.

69. The isolated genetic marker of claim 63, wherein said nucleic acid sequence is operably linked to an inducible, constitutive, pathogen- or wound-induced, environmentally- or developmentally-regulated, or cell- or tissue-specific promoter.

70. An expression vector comprising a nucleic acid sequence selected from the group consisting of the nucleic acid sequences shown in FIG. 1, FIGS. 3 to 7, FIGS. 10 to 158, FIGS. 162 to 170, FIGS. 172-1 to 172-19, and FIGS. 173-1 to 173-294, said vector being capable of directing expression of the polypeptide encoded by said nucleic acid sequence.

71. A plant or plant component comprising an isolated nucleic acid sequence selected from the group consisting of the nucleic acid sequences shown in FIG. 1, FIGS. 3 to 7, FIGS. 10 to 158, FIGS. 162 to 170, FIGS. 172-1 to 172-19, and FIGS. 173-1 to 173-294, wherein said nucleic acid sequence is expressed in said plant or said plant component.

72. The plant or plant component of claim 71, wherein said plant or plant component is a species of Nicotiana.

73. The plant or plant component of claim 72, wherein said species of Nicotiana is selected from the group of Nicotiana species shown in Table 8.

74. The plant or plant component of claim 71, wherein said plant component is a leaf, stem, or seed.

75. The plant or plant component of claim 74, wherein said leaf is a cured tobacco leaf.

76. A tobacco product comprising the plant or plant component of claim 71.

77. The tobacco product of claim 76, wherein said tobacco product is a smokeless tobacco product.

78. The tobacco product of claim 76, wherein said tobacco product is a moist or dry snuff, a chewing tobacco, a cigarette product, a cigar product, a cigarillo, a pipe tobacco, or bidis.

79. A plant produced from a germinated seed of claim 74.

80. A method for reducing the expression or enzymatic activity of a constitutive, or an ethylene induced or senescence induced tobacco polypeptide in a plant cell, said method comprising reducing the level or enzymatic activity of an endogenous constitutive, or ethylene or senescence induced tobacco polypeptide in said plant cell.

81. The method of claim 80, wherein said tobacco polypeptide is a p450.

82. The method of claim 80, wherein said plant cell is from a species of Nicotiana.

83. The method of claim 82, wherein said species of Nicotiana is selected from the group of Nicotiana species shown in Table 8.

84. The method of claim 80, wherein reducing the level of said endogenous constitutive, or ethylene or senescence induced tobacco polypeptide comprises expressing a transgene encoding an antisense nucleic acid molecule of a nucleic acid sequence selected from the group consisting of the nucleic acid sequences shown in FIG. 1, FIGS. 3 to 7, FIGS. 10 to 158, FIGS. 162 to 170, FIGS. 172-1 to 172-19, and FIGS. 173-1 to 173-294 in said plant cell.

85. The method of claim 80, wherein reducing the level of said constitutive, or ethylene or senescence induced tobacco polypeptide comprises expressing a transgene comprising a nucleic acid sequence selected from the group consisting of the nucleic acid sequences shown in FIG. 1, FIGS. 3 to 7, FIGS. 10 to 158, FIGS. 162 to 170, FIGS. 172-1 to 172-19, and FIGS. 173-1 to 173-294, said transgene encoding a double-stranded RNA molecule of a constitutive, or an ethylene or senescence induced tobacco polypeptide in said plant cell.

86. The method of claim 80, wherein reducing the level of said endogenous constitutive, or ethylene or senescence induced tobacco polypeptide comprises co-suppression of said constitutive, or ethylene or senescence induced tobacco polypeptide in said plant cell.

87. The method of claim 80, wherein reducing the level of said endogenous constitutive, or ethylene or senescence induced tobacco polypeptide comprises expressing a dominant negative gene product in said plant cell.

88. The method of claim 87, wherein said endogenous constitutive, or ethylene or senescence induced tobacco polypeptide comprises a mutation in a gene that encodes an amino acid sequence selected from the group consisting of amino acid sequences shown in FIG. 1, FIGS. 3 and 4, FIGS. 10 to 158, FIGS. 160A to 160E, FIGS. 162 to 170, and FIGS. 172-1 to 172-19.

89. The method of claim 80, wherein said reduced expression occurs at the transcriptional level, at the translational level, or at the post-translational level.

90. A method for increasing the expression or enzymatic activity of a constitutive, or an ethylene or senescence induced tobacco polypeptide in a plant cell, said method comprising increasing the level or enzymatic activity of an endogenous constitutive, or ethylene or senescence induced tobacco polypeptide in said plant cell.

91. The method of claim 90, wherein said plant cell is from a species of Nicotiana.

92. The method of claim 91, wherein said species of Nicotiana is selected from the group of Nicotiana species shown in Table 8.

93. The method of claim 90, wherein increasing the level of said constitutive, or ethylene or senescence induced tobacco polypeptide comprises expressing a transgene comprising a nucleic acid sequence selected from the group consisting of the nucleic acid sequences shown in FIG. 1, FIGS. 3 to 7, FIGS. 10 to 158, FIGS. 162 to 170, FIGS. 172-1 to 172-19, and FIGS. 173-1 to 173-294 in said plant cell.

94. The method of claim 90, wherein said increased expression occurs at the transcriptional level, at the translational level, or at the post-translational level.

The application's sequence listing, which the Patent Office published only in electronic form, follows.

SEQUENCE LISTING (2300 sequences)

SEQ ID NO: 1 - DNA, 177 bp, Nicotiana tabacum
atgacttatgcattgcaagtggaacacttaacaatggcacatttgatccaaggtttcaattacagaactccaaatgacgagcccttggatatgaaggaaggtgcaggcataactatacgtaaggtaaatcctgtggaactgataatagcgcctcgcctggcacctgagctttattaa

SEQ ID NO: 2 - protein, 58 aa, Nicotiana tabacum
MTYALQVEHLTMAHLIQGFNYRTPNDEPLDMKEGAGITIRKVNPVELIIAPRLAPELY

SEQ ID NO: 3 - protein, 517 aa, Nicotiana tabacum
MLSPIEAIVGLVTFTFLFFFLWTKKSQKPSKPLPPKIPGGWPVIGHLFHFNDDGDDRPLARKLGDLADKYGPVFTFRLGLPLVLVVSSYEAVKDCFSTNDAIFSNRPAFLYGDYLGYNNAMLFLANYGPYWRKNRKLVIQEVLSASRLEKFKHVRFARIQASIKNLYTRIDGNSSTINLTDWLEELNFGLIVKMIAGKNYESGKGDEQVERFKKAFKDFMILSMEFVLWDAFPIPLFKWVDFQGHVKAMKRTFKDIDSVFQNWLEEHINKREKMEVNAEGNEQDFIDVVLSKMSNEYLGEGYSRDTVIKATVFSLVLDAADTVALHINWGMALLINNQKALTKAQEEIDTKVGKDRWVEESDIKDLVYLQAIVKEVLRLYPPGPLLVPHENVEDCVVSGYHIPKGTRLFANVMKLQRDPKLWSDPDTFDPERFIATDIDFRGQYYKYIPFGSGRRSCPGMTYALQVEHLTMAHLIQGFNYRTPNDEPLDMKEGAGITIRKVNPVELIIAPRLAPELY

SEQ ID NO: 4 - DNA, 6347 bp, Nicotiana tabacum
tctctaaagtccccttccactttatcttagctgtgtgatttctttcagacaaccttatttttattcagactcttatttgtattattctagaagctcgtgtacttgtgacaccagttctgggatggtatttagatatcgctattattttggcttattcacttcagttcagattttattccagttatttgatttctttattattaatcaaattgaattgttaaaaatggttaaaattactccaatgttggctttcctagtaagcgaaatatcaggcgccatcacggtacccgaaggtgagaatttcagatcgtgacagccgcatctcaaggggtgtgatgtaaacagtttacgatggtgcaagcattagtggctgcttcgacgacttaaatccgtaacttatagatcacacgaatacaactttactattttaacacccagcaaattcctgataaaaacaattctaacatagcacatcaaaatgtaaatgattgaagaaaaagatgacttttatagacagagaaaaaaacagttacgtgtggggttgaatagagattgtggctatgctatttctaatattgaaattcaccgacttttttagttcaatacgaaaagagtaagtgaaaaggtctgaaaaggaaaaggacaatgcctaaaaggacacattcagaacacatacactgaatgattctaatttctagtccgaagatttctagttcgaggataacgtgagcaatcggttacttcccattagcaattgccaactggatgtttgactatttatgtttctggccaatagaggagaggaatactacgttacgtatggagtttgaacccttcacatcaacttattaagtgagttatccctcaatcacgattcaactatgattccgctaacttcaaagaatattgagttaattattcaaatgattagtccaaaattatttaataaagttatactatttcttttatttgtaacatacatcttttgtttacatatttagttaaatcttagcccaaccctatcgttggttcgactttttttcttttaattttgatttattctgttcggtaatttcgctttgtttggcttgaataataactagtgcataaagtcatatactctaatatttttaattgaagtactcacaaatacaaaaataaaaaacattctaagctcacatgatagttgacaaaatctttatccaaaacaagaggcggagccaggatttgaaacttatgggttcagaattctaaatctcttaagttactaggttctaaattaataatttatacatgttcaatgaatttcttaagacaaatacatagtttgaacgaaagctactgggttcggccgaatccgtaagttatactctccctccgccccggtccaaaaccagctagtatcaatagagagagagagagagagagagagataataaatttgaccattgacaatggcttattacttgcttagagttaattggtgaacttagagaatataataaggaatatttaaacagatacgtcatcaatccacgagtaacgaagtaagaaataccctaaaatcgtagaaacattacgttaaattgcttgacagcctatctagtaagagtcaaaatctactatctatcttgttccgccattttcttaaagaagtacatgagctttatcatccacctcaacatgaatgcaaaagaaaattattgtgcaacttaatatgttataatcaatgatatgtgtcttgtgtaacaaagtatatatttcgatacgatattaatatgtaggtgttatatttttaaatatcaaatatcatacttaacaccgattttttaaaaacttaggccaattaccctaccaactaaaatactgtatatcaaacactaatgttttctatttcggtacgacagttctctatttaccatattatggaattatgcccatcctacagttacctataaaaaggaagttgccgatagttatattctcaacttcttatctaaaaatccataatgctttctcccatagaagccattgtaggactagtaaccttcacatttctcttcttcttcctatggacaaaaaaatctcaaaaaccttcaaaacccttaccaccgaaaatccccggaggatggccggtaatcggccatcttttccacttcaatgacgacggcgacgaccgtccattagctcgaaaactcggagacttagctgacaaatacggccccgttttcacttttcggctaggccttccccttgtcttagttgtaagcagttacgaagctgtaaaagactgtttctctacaaatgacgccattttttccaatcgtccagcttttctttacggcgattaccttggctacaataatgccatgctatttttggccaattacggaccttactggcgaaaaaatcgaaaattagttattcaggaagttctctccgctagtcgtctcgaaaaattcaaacacgtgagatttgcaagaattcaagcgagcattaagaatttatatactcgaattgatggaaattcgagtacgataaatttaactgattggttagaagaattgaattttggtctgatcgtgaagatgatcgctggaaaaaattatgaatccggtaaaggagatgaacaagtggagagatttaagaaagcgtttaaggattttatgattttatcaatggagtttgtgttatgggatgcatttccaattccattatttaaatgggtggattttcaagggcatgttaaggctatgaaaaggacttttaaagatatagattctgtttttcagaattggttagaggaacatattaataaaagagaaaaaatggaggttaatgcagaagggaatgaacaagatttcattgatgtggtgctttcaaaaatgagtaatgaatatcttggtgaaggttactctcgtgatactgtcattaaagcaacggtgtttgtaagttcatctgtcatttttcatttattcacttttattttgaggagcagacatgttaataataatttggagcaactgtaaagttatctatgtgtacaggttcgagcctcaggtgcaaccactaatgcttgtattagattatgttgtctgcatcatacccctaattggagtgtggctcttcccgaaccctgcaatgctggatgctggatgctttatgtatcagactgacctttttgttaaactatctaaatactaaggatgatttaataaaaatatagaatggtaaacagaaaaagatgagattatttttggggctatatggattcgcccgggctttgggaggtaaaacggtatctaccagttgagactttactccagaactttatctcgagagctctgaataaaaatgaaatagtatttaccactccaaaatctttgatggtaaaaagatgagatataacctcttataattgattgaaccacgttgatagaataaaacttctttactcccattcagcataagaaaaatgaaaccaaacggaattcttctcttttttagggggaaattccttaattgcttgttgaatatagattcatgtcgttattctatttttaataatgatgaaaatcaatatagtcaaagttaatacttatgtcatttggtttgcggacaagttatattggaactatataatacgtctattatagaatagtgattatttagaggatatacattttttttggataaatatttgatttattggattaaaaatagaatatacaggtaaggtctaaaacgtgtgtttgcttttacactaaataaacttgacctcgtacaattctaagaaaatatttgaaataaatgaattattttattgttaatcaattaaaaaaatcatagtatagatgagatgtgtgcatacttgacaataactatactaactaaaacaaggtatgtgaataattgatattccttttttaattattcttttttccagagtttggtcttggatgcagcagacacagttgctcttcacataaattggggaatggcattattgataaacaatcaaaaggccttgacgaaagcacaagaagagatagacacaaaagttggtaaggacagatgggtagaagagagtgatattaaggatttggtatacctccaagctattgttaaagaagtgttacgattatatccaccaggacctttgttagtaccacacgaaaatgtagaagattgtgttgttagtggatatcacattcctaaagggacaagattattcgcaaacgtcatgaaactgcaacgtgatcctaaactctggtctgatcctgatactttcgatccagagagattcattgctactgatattgactttcgtggtcagtactataagtatatcccgtttggttctggaagacgatcttgtccagggatgacttatgcattgcaagtggaacacttaacaatggcacatttgatccaaggtttcaattacagaactccaaatgacgagcccttggatatgaaggaaggtgcaggcataactatacgtaaggtaaatcctgtggaactgataatagcgcctcgcctggcacctgagctttattaaaacctaagatctttcatcttggttgatcattgtataatactcctaaatggatattcatttaccttttatcaattaattgtcagtacgagtttttctaatttggtacatttgtaataataagtaaagaataattgtgctaatatataaaggtttgtagaagataattgactggttgtaccacaatctccagtgaaagtgttaattatttacttgatccacagcttattctatgtttgaaatttgcctagtgtcatgatattactccatcaaattcaagaaataatcatttccaacttttgctggactggacgatctttcaataataaaggatctttaatttgccaaagttgagatcaaaatactggtcgctttaccaataagaatgaaatgtgatggaaattatgtacgttgggataagggaacacaactatcaaggagactaaaaggtacgtaaaggaaaagaaaaaatttgccattgattgctactaagtaacctaacaaaatctttcagaaaagaatcacttgtataagtcggggttgaaagttttggtgtctcttttcttatgtattgttgtctttagacagtattgtacttagttatttcagaattttattttcgtattagagctcaagactctgtatttattagttctgggagaattatcatgtattttcagtcttttgttatttctgtaaattccgctattttggttctttattgctatgttcggctttcctagaaaatgtgttaggcgctatcacgactgattgagattttgtatcgtgactgataattacacggtttagtaaattttgatattttcaaaaagagtttttttaataaaatatgcaacttcagtcaaaacatacaacgttttgttgtataaatccgatcaaaacatataacttacataaaacttgcgtatgaattttttgttgtataaacatttggttaaaacatataacttacatataatttgcatacaacttacataaaacttgcatataaacaatttatttatgtctttgtttttgagtatcaatttgaaattccaacaaaaacaaactctaatttttaccaaactctctcaaaattgagttatagatttcaaaagatatccttaatcgtttgcaattgtaacaatccgatcggccgttttgagatctagcgtgttgtttggcggtttgagaccttgagtaacttcactttatgttgtatgacttgtatatgtggtcggaattaaatttcgggaagttcagagttgattcggatgaaaaattctaatttcggaagttttaagatggaatgattgactaaggattgacgtttgagtaaacgatctcggaatcgagatttgaaggttccaataggttcgtatgatgatttcagacttgagcgtatgtttgggttgagtatcgggtggtccgggagcatttcaacgctgattatagaaaattggcatcttaaaggttttagaatttcataagtttggtttgaagtggattttgatattatcggtgtccatttggagtttcgagccttggaataggttcgtatcgtaaattttgactttagtgtaaagttcggcgtcattccggagtgttttgataagattctgatgcgttcgtcgaagtttggaagtttgaaagttgaaaagaagatttttaataggcgattcatgattttgatgttatttgtgtcgagcctttggataagtttgtgtgaggtatgggacttgttggtatgaatggacgagctctacgggggcctcgagtaagtttcgga

SEQ ID NO: 5 - DNA, 1554 bp, Nicotiana tabacum
atgctttctcccatagaagccattgtaggactagtaaccttcacatttctcttcttcttcctatggacaaaaaaatctcaaaaaccttcaaaacccttaccaccgaaaatccccggaggatggccggtaatcggccatcttttccacttcaatgacgacggcgacgaccgtccattagctcgaaaactcggagacttagctgacaaatacggccccgttttcacttttcggctaggccttccccttgtcttagttgtaagcagttacgaagctgtaaaagactgtttctctacaaatgacgccattttttccaatcgtccagcttttctttacggcgattaccttggctacaataatgccatgctatttttggccaattacggaccttactggcgaaaaaatcgaaaattagttattcaggaagttctctccgctagtcgtctcgaaaaattcaaacacgtgagatttgcaagaattcaagcgagcattaagaatttatatactcgaattgatggaaattcgagtacgataaatttaactgattggttagaagaattgaattttggtctgatcgtgaagatgatcgctggaaaaaattatgaatccggtaaaggagatgaacaagtggagagatttaagaaagcgtttaaggattttatgattttatcaatggagtttgtgttatgggatgcatttccaattccattatttaaatgggtggattttcaagggcatgttaaggctatgaaaaggacttttaaagatatagattctgtttttcagaattggttagaggaacatattaataaaagagaaaaaatggaggttaatgcagaagggaatgaacaagatttcattgatgtggtgctttcaaaaatgagtaatgaatatcttggtgaaggttactctcgtgatactgtcattaaagcaacggtgtttagtttggtcttggatgcagcagacacagttgctcttcacataaattggggaatggcattattgataaacaatcaaaaggccttgacgaaagcacaagaagagatagacacaaaagttggtaaggacagatgggtagaagagagtgatattaaggatttggtatacctccaagctattgttaaagaagtgttacgattatatccaccaggacctttgttagtaccacacgaaaatgtagaagattgtgttgttagtggatatcacattcctaaagggacaagattattcgcaaacgtcatgaaactgcaacgtgatcctaaactctggtctgatcctgatactttcgatccagagagattcattgctactgatattgactttcgtggtcagtactataagtatatcccgtttggttctggaagacgatcttgtccagggatgacttatgcattgcaagtggaacacttaacaatggcacatttgatccaaggtttcaattacagaactccaaatgacgagcccttggatatgaaggaaggtgcaggcataactatacgtaaggtaaatcctgtggaactgataatagcgcctcgcctggcacctgagctttattaa

SEQ ID NO: 6 - protein, 517 aa, Nicotiana tabacum; identical to SEQ ID NO: 3

SEQ ID NO: 7 - DNA, 998 bp, Nicotiana tabacum
gtaagttcatctgtcatttttcatttattcacttttattttgaggagcagacatgttaataataatttggagcaactgtaaagttatctatgtgtacaggttcgagcctcaggtgcaaccactaatgcttgtattagattatgttgtctgcatcatacccctaattggagtgtggctcttcccgaaccctgcaatgctggatgctggatgctttatgtatcagactgacctttttgttaaactatctaaatactaaggatgatttaataaaaatatagaatggtaaacagaaaaagatgagattatttttggggctatatggattcgcccgggctttgggaggtaaaacggtatctaccagttgagactttactccagaactttatctcgagagctctgaataaaaatgaaatagtatttaccactccaaaatctttgatggtaaaaagatgagatataacctcttataattgattgaaccacgttgatagaataaaacttctttactcccattcagcataagaaaaatgaaaccaaacggaattcttctcttttttagggggaaattccttaattgcttgttgaatatagattcatgtcgttattctatttttaataatgatgaaaatcaatatagtcaaagttaatacttatgtcatttggtttgcggacaagttatattggaactatataatacgtctattatagaatagtgattatttagaggatatacattttttttggataaatatttgatttattggattaaaaatagaatatacaggtaaggtctaaaacgtgtgtttgcttttacactaaataaacttgacctcgtacaattctaagaaaatatttgaaataaatgaattattttattgttaatcaattaaaaaaatcatagtatagatgagatgtgtgcatacttgacaataactatactaactaaaacaaggtatgtgaataattgatattccttttttaattattcttttttccag

SEQ ID NO: 8 - DNA, 2009 bp, Nicotiana tabacum
tctctaaagtccccttccactttatcttagctgtgtgatttctttcagacaaccttatttttattcagactcttatttgtattattctagaagctcgtgtacttgtgacaccagttctgggatggtatttagatatcgctattattttggcttattcacttcagttcagattttattccagttatttgatttctttattattaatcaaattgaattgttaaaaatggttaaaattactccaatgttggctttcctagtaagcgaaatatcaggcgccatcacggtacccgaaggtgagaatttcagatcgtgacagccgcatctcaaggggtgtgatgtaaacagtttacgatggtgcaagcattagtggctgcttcgacgacttaaatccgtaacttatagatcacacgaatacaactttactattttaacacccagcaaattcctgataaaaacaattctaacatagcacatcaaaatgtaaatgattgaagaaaaagatgacttttatagacagagaaaaaaacagttacgtgtggggttgaatagagattgtggctatgctatttctaatattgaaattcaccgacttttttagttcaatacgaaaagagtaagtgaaaaggtctgaaaaggaaaaggacaatgcctaaaaggacacattcagaacacatacactgaatgattctaatttctagtccgaagatttctagttcgaggataacgtgagcaatcggttacttcccattagcaattgccaactggatgtttgactatttatgtttctggccaatagaggagaggaatactacgttacgtatggagtttgaacccttcacatcaacttattaagtgagttatccctcaatcacgattcaactatgattccgctaacttcaaagaatattgagttaattattcaaatgattagtccaaaattatttaataaagttatactatttcttttatttgtaacatacatcttttgtttacatatttagttaaatcttagcccaaccctatcgttggttcgactttttttcttttaattttgatttattctgttcggtaatttcgctttgtttggcttgaataataactagtgcataaagtcatatactctaatatttttaattgaagtactcacaaatacaaaaataaaaaacattctaagctcacatgatagttgacaaaatctttatccaaaacaagaggcggagccaggatttgaaacttatgggttcagaattctaaatctcttaagttactaggttctaaattaataatttatacatgttcaatgaatttcttaagacaaatacatagtttgaacgaaagctactgggttcggccgaatccgtaagttatactctccctccgccccggtccaaaaccagctagtatcaatagagagagagagagagagagagagataataaatttgaccattgacaatggcttattacttgcttagagttaattggtgaacttagagaatataataaggaatatttaaacagatacgtcatcaatccacgagtaacgaagtaagaaataccctaaaatcgtagaaacattacgttaaattgcttgacagcctatctagtaagagtcaaaatctactatctatcttgttccgccattttcttaaagaagtacatgagctttatcatccacctcaacatgaatgcaaaagaaaattattgtgcaacttaatatgttataatcaatgatatgtgtcttgtgtaacaaagtatatatttcgatacgatattaatatgtaggtgttatatttttaaatatcaaatatcatacttaacaccgattttttaaaaacttaggccaattaccctaccaactaaaatactgtatatcaaacactaatgttttctatttcggtacgacagttctctatttaccatattatggaattatgcccatcctacagttacctataaaaaggaagttgccgatagttatattctcaacttcttatctaaaaatccata

SEQ ID NO: 9 - DNA, 1786 bp, Nicotiana tabacum
aacctaagatctttcatcttggttgatcattgtataatactcctaaatggatattcatttaccttttatcaattaattgtcagtacgagtttttctaatttggtacatttgtaataataagtaaagaataattgtgctaatatataaaggtttgtagaagataattgactggttgtaccacaatctccagtgaaagtgttaattatttacttgatccacagcttattctatgtttgaaatttgcctagtgtcatgatattactccatcaaattcaagaaataatcatttccaacttttgctggactggacgatctttcaataataaaggatctttaatttgccaaagttgagatcaaaatactggtcgctttaccaataagaatgaaatgtgatggaaattatgtacgttgggataagggaacacaactatcaaggagactaaaaggtacgtaaaggaaaagaaaaaatttgccattgattgctactaagtaacctaacaaaatctttcagaaaagaatcacttgtataagtcggggttgaaagttttggtgtctcttttcttatgtattgttgtctttagacagtattgtacttagttatttcagaattttattttcgtattagagctcaagactctgtatttattagttctgggagaattatcatgtattttcagtcttttgttatttctgtaaattccgctattttggttctttattgctatgttcggctttcctagaaaatgtgttaggcgctatcacgactgattgagattttgtatcgtgactgataattacacggtttagtaaattttgatattttcaaaaagagtttttttaataaaatatgcaacttcagtcaaaacatacaacgttttgttgtataaatccgatcaaaacatataacttacataaaacttgcgtatgaattttttgttgtataaacatttggttaaaacatataacttacatataatttgcatacaacttacataaaacttgcatataaacaatttatttatgtctttgtttttgagtatcaatttgaaattccaacaaaaacaaactctaatttttaccaaactctctcaaaattgagttatagatttcaaaagatatccttaatcgtttgcaattgtaacaatccgatcggccgttttgagatctagcgtgttgtttggcggtttgagaccttgagtaacttcactttatgttgtatgacttgtatatgtggtcggaattaaatttcgggaagttcagagttgattcggatgaaaaattctaatttcggaagttttaagatggaatgattgactaaggattgacgtttgagtaaacgatctcggaatcgagatttgaaggttccaataggttcgtatgatgatttcagacttgagcgtatgtttgggttgagtatcgggtggtccgggagcatttcaacgctgattatagaaaattggcatcttaaaggttttagaatttcataagtttggtttgaagtggattttgatattatcggtgtccatttggagtttcgagccttggaataggttcgtatcgtaaattttgactttagtgtaaagttcggcgtcattccggagtgttttgataagattctgatgcgttcgtcgaagtttggaagtttgaaagttgaaaagaagatttttaataggcgattcatgattttgatgttatttgtgtcgagcctttggataagtttgtgtgaggtatgggacttgttggtatgaatggacgagctctacgggggcctcgagtaagtttcgga

SEQ ID NO: 10 - DNA, 207 bp, Nicotiana tabacum
gcacaacttgctatcaacttggtcacatctatgttgggtcatttgttgcatcattttacatgggctccggccccgggggttaacccggaggatattgacttggaggagagccctggaacagtaacttacatgaaaaatccaatacaagctattccaactccaagattgcctgcacacttgtatggacgtgtgccagtggatatgtaa

SEQ ID NO: 11 - protein, 68 aa, Nicotiana tabacum
AQLAINLVTSMLGHLLHHFTWAPAPGVNPEDIDLEESPGTVTYMKNPIQAIPTPRLPAHLYGRVPVDM

SEQ ID NO: 12 - DNA, 207 bp, Nicotiana tabacum
gcacaacttgctatcaacttggtcacatctatgttgggtcatttgttgcatcattttacgtgggctccgcccccgggggttaacccggagaatattgacttggaggagagccctggaacagtaacttacatgaaaaatccaatacaagctattcctactccaagattgcctgcacacttgtatggacgtgtgccagtggatatgtaa

SEQ ID NO: 13 - protein, 68 aa, Nicotiana tabacum
AQLAINLVTSMLGHLLHHFTWAPPPGVNPENIDLEESPGTVTYMKNPIQAIPTPRLPAHLYGRVPVDM

SEQ ID NO: 14 - DNA, 183 bp, Nicotiana tabacum
atgaattattcattgcaagtggaacacctttcaattgctcatatgatccaaggtttcagttttgcaactacgaccaatgagcctttggatatgaaacaaggtgtgggtttaactttaccaaagaagactgatgttgaagtgctaattacacctcgccttcctcctacgctttatcaatattaa

SEQ ID NO: 15 - protein, 60 aa, Nicotiana tabacum
MNYSLQVEHLSIAHMIQGFSFATTTNEPLDMKQGVGLTLPKKTDVEVLITPRLPPTLYQY

SEQ ID NO: 16 - DNA, 132 bp, Nicotiana tabacum
gcacaacttgctatcaacttggtcacatctatgttgggtcatttgttcatcattttacatgggctccggccccgggggttaacccggaggatattgacttggaggagagccctggaacagtaacttacatga

SEQ ID NO: 17 - protein, 40 aa, Nicotiana tabacum
AQLAINLVTSMLGHLFIILHGLRPRGLTRRILTWRRALEQ

SEQ ID NO: 18 - DNA, 189 bp, Nicotiana tabacum
gaaggattggctgttcgaatggttgccttgtcattgggatgtattattcaatgttttgattggcaacgaatcggcgaagaattggttgatatgactgaaggaactggacttactttgcctaaagctcaacctttggtggccaagtgtagcccacgacctaaaatggctaatcttctctctcagatttga

SEQ ID NO: 19 - protein, 62 aa, Nicotiana tabacum
EGLAVRMVALSLGCIIQCFDWQRIGEELVDMTEGTGLTLPKAQPLVAKCSPRPKMANLLSQI

SEQ ID NO: 20 - DNA, 189 bp, Nicotiana tabacum
gaaggattggctattcgaatggttgcattgtcattgggatgtattattcaatgctttgattggcaacgacttggggaaggattggttgataagactgaaggaactggacttactttgcctaaagctcaacctttagtggccaagtgtagcccacgacctataatggctaatcttctttctcagatttga

SEQ ID NO: 21 - protein, 62 aa, Nicotiana tabacum
EGLAIRMVALSLGCIIQCFDWQRLGEGLVDKTEGTGLTLPKAQPLVAKCSPRPIMANLLSQI

SEQ ID NO: 22 - DNA, 183 bp, Nicotiana tabacum
ataggttttgcgactttagtgacacatctgacttttggtcgcttgcttcaaggttttgattttagtaagccatcaaacacgccaattgacatgacagaaggcgtaggcgttactttgcctaaggttaatcaagttgaagttctaattacccctcgtttaccttctaagctttatttattttga

SEQ ID NO: 23 - protein, 60 aa, Nicotiana tabacum
IGFATLVTHLTFGRLLQGFDFSKPSNTPIDMTEGVGVTLPKVNQVEVLITPRLPSKLYLF

SEQ ID NO: 24 - DNA, 178 bp, Nicotiana tabacum
ataggctttgcgactttagtgacacatctgacttttggtcgcttgcttcaaggttttgattttagtaagccatcaaacacgccaattgacatgacagaaggcgtaggcgttactttgcctaaggttaatcaagttgaagttctaattacccctcgtttaccttctaagctttatttat

SEQ ID NO: 25 - protein, 59 aa, Nicotiana tabacum
IGFATLVTHLTFGRLLQGFDFSKPSNTPIDMTEGVGVTLPKVNQVEVLITPRLPSKLYL

SEQ ID NO: 26 - DNA, 183 bp, Nicotiana tabacum
ataaattttgcgactttagtgacacatctgacttttggtcgcttgcttcaaggttttgattttagtacgccatcaaacacgccaatagacatgacagaaggcgtaggcgttactttgcctaaggtaaatcaagtggaagttctaattagccctcgtttaccttctaagctttatgtattctga

SEQ ID NO: 27 - protein, 60 aa, Nicotiana tabacum
INFATLVTHLTFGRLLQGFDFSTPSNTPIDMTEGVGVTLPKVNQVEVLISPRLPSKLYVF

SEQ ID NO: 28 - DNA, 171 bp, Nicotiana tabacum
attatacttgcattgccaattcttggcatcactttgggacgtttggttcagaactttgagctgttgcctcctccaggccagtcgaagctcgacaccacagagaaaggtggacagttcagtctccacattttgaagcattccaccattgtgttgaaaccaaggtctttctga

SEQ ID NO: 29 - protein, 56 aa, Nicotiana tabacum
IILALPILGITLGRLVQNFELLPPPGQSKLDTTEKGGQFSLHILKHSTIVLKPRSF

SEQ ID NO: 30 - DNA, 171 bp, Nicotiana tabacum
attatacttgcattgccaattcttggcattactttgggacgtttggttcagaactttgagctgttgcctcctccaggccagtcgaagctcgacaccacagagaaaggtggacagttcagtctccatattttgaagcattccaccattgtgttgaaaccaaggtcttgctga

SEQ ID NO: 31 - protein, 56 aa, Nicotiana tabacum
IILALPILGITLGRLVQNFELLPPPGQSKLDTTEKGGQFSLHILKHSTIVLKPRSC

SEQ ID NO: 32 - DNA, 172 bp, Nicotiana tabacum
tattgcacttggggttgcatcaatggaacttgcattgtcaaatcttctttatgcatttgattgggagttaccttttggaatgaaaaaagaagacattgacacaaacgccaggcctggaattaccatgcataagaaaaacgaactttatcttatccctaaaaattatctatag

SEQ ID NO: 33 - protein, 63 aa, Nicotiana tabacum
IALGVASMELALSNLLYAFDWELPFGMKKEDIDTNARPGITMHKKNELYLIPKNYLPSKLYLF

SEQ ID NO: 34 - DNA, 171 bp, Nicotiana tabacum
attgcacttggggttgcatccatggaacttgctttgtcaaatcttctttatgcatttgattgggagttaccttacggagtgaaaaaagaaaacattgacacaaatgtcaggcctggaattaccatgcataagaaaaacgaactttgccttatccctagaaattatctatag

SEQ ID NO: 35 - protein, 56 aa, Nicotiana tabacum
IALGVASMELALSNLLYAFDWELPYGVKKENIDTNVRPGITMHKKNELCLIPRNYL

SEQ ID NO: 36 - DNA, 174 bp, Nicotiana tabacum
ggtattgcacttggggttgcatccatggaacttgctttgtcaaatcttctttatgcatttgattgggagttgccttatggagtgaaaaaagaagacatcgacacaaacgttaggcctggaattgccatgcacaagaaaaacgaactttgccttgtcccaaaaaattatttataa

SEQ ID NO: 37 - protein, 56 aa, Nicotiana tabacum
IALGVASMELALSNLLYAFDWELPYGVKKEDIDTNVRPGIAMHKKNELCLVPKNYL

SEQ ID NO: 38 - DNA, 201 bp, Nicotiana tabacum
attgcacttggggttgcatccatggaacttgctttgtcaaatcttctttatgcatttgattgggagttgccttatggagtgaaaaaagaagacatcgacacaaacgttaggcctggaattgccatgcacaagaaaaacgaactttgccttgtcccaaaaaaattatttataaattatattgggacgtggatctcatgctag

SEQ ID NO: 39 - protein, 66 aa, Nicotiana tabacum
IALGVASMELALSNLLYAFDWELPYGVKKEDIDTNVRPGIAMHKKNELCLVPKKLFINYIGTWISC

SEQ ID NO: 40 - DNA, 183 bp, Nicotiana tabacum
atttcgtttggtttagctaatgcttatttgccattggctcaattactttatcactttgattgggaactccccactggaatcaaaccaagcgacttggacttgactgagttggttggagtaactgccgctagaaaaagtgacctttacttggttgcgactccttatcaacctcctcaaaactga

SEQ ID NO: 41 - protein, 60 aa, Nicotiana tabacum
ISFGLANAYLPLAQLLYHFDWELPTGIKPSDLDLTELVGVTAARKSDLYLVATPYQPPQN

SEQ ID NO: 42 - DNA, 183 bp, Nicotiana tabacum
atttcgtttggcttagctaatgcttatttgccattggctcaattactatatcacttcgattggaaactccctgctggaatcgaaccaagcgacttggacttgactgagttggttggagtaactgccgctagaaaaagtgacctttacttggttgcgactccttatcaacctcctcaaaagtga

SEQ ID NO: 43 - protein, 60 aa, Nicotiana tabacum
ISFGLANAYLPLAQLLYHFDWKLPAGIEPSDLDLTELVGVTAARKSDLYLVATPYQPPQK

SEQ ID NO: 44 - DNA, 220 bp, Nicotiana tabacum
atgctatttggtttagctaatgttggacaacctttagctcagttactttatcacttcgattggaaactccctaatggacaaagtcatgagaatttcgacatgactgagtcacctggaatttctgctacaagaaaggatgatcttgttttgattgccactccttatgattcttattaattccagtctatatcatctatatgtactcaataattgtatggga

SEQ ID NO: 45 - protein, 58 aa, Nicotiana tabacum
MLFGLANVGQPLAQLLYHFDWKLPNGQSHENFDMTESPGISATRKDDLVLIATPYDSY

SEQ ID NO: 46 - DNA, 174 bp, Nicotiana tabacum
atgctatttggtttagctaatgttggacaacctttagctcagttactttatcacttcgattggaaactccctaatggacaaactcaccaaaatttcgacatgactgagtcacctggaatttctgctacaagaaaggatgatcttattttgattgccactcctgctcattcttga

SEQ ID NO: 47 - protein, 57 aa, Nicotiana tabacum
MLFGLANVGQPLAQLLYHFDWKLPNGQTHQNFDMTESPGISATRKDDLILIATPAHS

SEQ ID NO: 48 - DNA, 177 bp, Nicotiana tabacum
ttattattcggtttagttaatgtaggacatcctttagctcaattgctttatcacttcgattggaagactcttcctgggataagttcagatagtttcgacatgactgaaacagatggagtaactgccggaagaaaggatgatctttgtttaattgctactccttttggtctcaattaa

SEQ ID NO: 49 - protein, 58 aa, Nicotiana tabacum
LLFGLVNVGHPLAQLLYHFDWKTLPGISSDSFDMTETDGVTAGRKDDLCLIATPFGLN

SEQ ID NO: 50 - DNA, 180 bp, Nicotiana tabacum
atgtcgtttggtttagttaacactgggcatcctttagctcagttgctctatttctttgactggaaattccctcataaggttaatgcagctgattttcacactactgaaacaagtagagtttttgcagcaagcaaagatgacctctacttgattccaacaaatcacatggagcaagagtag

SEQ ID NO: 51 - protein, 59 aa, Nicotiana tabacum
MSFGLVNTGHPLAQLLYFFDWKFPHKVNAADFHTTETSRVFAASKDDLYLIPTNHMEQE

SEQ ID NO: 52 - DNA, 180 bp, Nicotiana tabacum
atgtcgtttggtttagttaacacagggcatcctttagcccagttgctctattgctttgactggaaactccctgacaaggttaatgcaaatgattttcgcactactgaaacaagtagagtttttgcagcaagcaaagatgacctctacttgattcccacaaatcacagggagcaagaatag

SEQ ID NO: 53 - protein, 59 aa, Nicotiana tabacum
MSFGLVNTGHPLAQLLYCFDWKLPDKVNANDFRTTETSRVFAASKDDLYLIPTNHREQE

SEQ ID NO: 54 - DNA, 183 bp, Nicotiana tabacum
atgcaatttggtttggctcttgttactctgccattggctcatttgcttcacaattttgattggaaacttcccgaaggaattaatgcaagggatttggacatgacagaggcaaatgggatatctgctagaagagaaaaagatctttacttgattgctactccttatgtatcacctcttgattaa

SEQ ID NO: 55 - protein, 60 aa, Nicotiana tabacum
MQFGLALVTLPLAHLLHNFDWKLPEGINARDLDMTEANGISARREKDLYLIATPYVSPLD

SEQ ID NO: 56 - DNA, 177 bp, Nicotiana tabacum
atgacttatgcattgcaagtggaacacctaacaatggcacatttgatccagggtttcaattacagaactccaactgatgagcccttggatatgaaagaaggtgcaggcataactatacgtaaggtaaatcctgtgaaagtgataattacgcctcgcttggcacctgagctttattaa

SEQ ID NO: 57 - protein, 58 aa, Nicotiana tabacum
MTYALQVEHLTMAHLIQGFNYRTPTDEPLDMKEGAGITIRKVNPVKVIITPRLAPELY

SEQ ID NO: 58 - DNA, 177 bp, Nicotiana tabacum
atgacttatgcattgcaagtggaacacctaacaatggcacatttaatccagggtttcaattacaaaactccaaatgacgaggccttggatatgaaggaaggtgcaggcataactatacgtaaggtaaatcctgtggaactgataatagcgcctcgcctggcacctgagctttattaa

SEQ ID NO: 59 - protein, 58 aa, Nicotiana tabacum
MTYALQVEHLTMAHLIQGFNYKTPNDEALDMKEGAGITIRKVNPVELIIAPRLAPELY

SEQ ID NO: 60 - DNA, 177 bp, Nicotiana tabacum
atgacttatgcattgcaagtggaacacctaacaatggcacatttaatccagggtttcaattacaaaactccaaatgacgaggccttggatatgaaggaaggtgcaggcataacaatacgtaaggtaaatccagtggaattgataataacgcctcgcttggcacctgagctttactaa

SEQ ID NO: 61 - protein, 58 aa, Nicotiana tabacum
MTYALQVEHLTMAHLIQGFNYKTPNDEALDMKEGAGITIRKVNPVELIITPRLAPELY

SEQ ID NO: 62 - DNA, 177 bp, Nicotiana tabacum; identical to SEQ ID NO: 1

SEQ ID NO: 63 - protein, 58 aa, Nicotiana tabacum; identical to SEQ ID NO: 2

SEQ ID NO: 64 - DNA, 174 bp, Nicotiana tabacum
atgacttatgcattgcaagtggaacacttaacaatggcacatttgatccaaggtttcaattacagaactccaaatgacgagcccttggatatgaaggaaggtgcaggcataactatacgtaaggtaaatcctgtggaactgataatagcgcccctggcacctgagctttattaa

SEQ ID NO: 65 - protein, 57 aa, Nicotiana tabacum
MTYALQVEHLTMAHLIQGFNYRTPNDEPLDMKEGAGITIRKVNPVELIIAPLAPELY

SEQ ID NO: 66 - DNA, 177 bp, Nicotiana tabacum
atgacttatgcattgcaagtggaacacttaacaatggcacatttgatccaaggtttcaattacagaactccaaatgacgagcccttggatatgaaggaaggtgcaggcataactatacgtaaggtaaatcctgcggaactgataatagcgcctcgcctggcacctgagctttattaa

SEQ ID NO: 67 - protein, 58 aa, Nicotiana tabacum
MTYALQVEHLTMAHLIQGFNYRTPNDEPLDMKEGAGITIRKVNPAELIIAPRLAPELY

SEQ ID NO: 68 - DNA, 177 bp, Nicotiana tabacum
atgacttatgcattacaagtggaacacctaacaatagcacatttgatccagggtttcaattacaaaactccaaatgacgagcccttggatatgaaggaaggtgcaggattaaccatacgtaaagtaaatcctgtagaagtgacaactacggctcgcctggcacctgagctttattaa

SEQ ID NO: 69 - protein, 58 aa, Nicotiana tabacum
MTYALQVEHLTIAHLIQGFNYKTPNDEPLDMKEGAGLTIRKVNPVEVTTTARLAPELY

SEQ ID NO: 70 - DNA, 177 bp, Nicotiana tabacum
atgacttatgcattacaagtggaacacctaacaatagcacatttgatccagggtttcaattacaaaactccaaatgacgagcccttggatatgaaggaaggtgcaggattaactatacgtaaagtaaatcctgtagaagtgacaattacggctcgcctggcacctgagctttattaa

SEQ ID NO: 71 - protein, 58 aa, Nicotiana tabacum
MTYALQVEHLTIAHLIQGFNYKTPNDEPLDMKEGAGLTIRKVNPVEVTITARLAPELY

SEQ ID NO: 72 - DNA, 177 bp, Nicotiana tabacum
atgacttatgcattacaagtggaacacctaacaatagcacatttgatccagggtttcaattacaaaactccaaatgacgagcccctggatatgaaggaaggtgcaggattaactatacgtaaagtaaatcctgtagaagtgacaattacggctcgcctggcacctgagctttattaa

SEQ ID NO: 73 - protein, 58 aa, Nicotiana tabacum; identical to SEQ ID NO: 71

SEQ ID NO: 74 - DNA, 198 bp, Nicotiana tabacum
tatagccttggacttaaggttatccgagtaacattagccaacatgttgcatggattcaactggaaattacctgaaggtatgaagccagaagatataagtgtggaagaacattatgggctcactacacatcctaagtttcctgttcctgtgatcttggaatctagactttcttcagatctctattcccccatcacttaa

SEQ ID NO: 75 - protein, 65 aa, Nicotiana tabacum
YSLGLKVIRVTLANMLHGFNWKLPEGMKPEDISVEEHYGLTTHPKFPVPVILESRLSSDLYSPIT

SEQ ID NO: 76 - DNA, 190 bp, Nicotiana tabacum
atacagtcttgggattcgtataattagggcaactttagctaacttgttgcatggattcaactggagattgcctaatggtatgagtccagaagacattagcatggaagagatttatgggctaattacacaccccaaagtcgcacttgacgtgatgatggagcctcgacttcccaaccatctttacaaatag

SEQ ID NO: 77 - protein, 62 aa, Nicotiana tabacum
YSLGIRIIRATLANLLHGFNWRLPNGMSPEDISMEEIYGLITHPKVALDVMMEPRLPNHLYK

SEQ ID NO: 78 - DNA, 174 bp, Nicotiana tabacum
attaatttttcaataccacttgttgagcttgcacttgctaatctattgtttcattataattggtcacttcctgaagggatgctagctaaggatgttgatatggaagaagctttggggattaccatgcacaagaaatctcccctttgcttagtagcttctcattatacttgttga

SEQ ID NO: 79 - protein, 57 aa, Nicotiana tabacum
INFSIPLVELALANLLFHYNWSLPEGMLAKDVDMEEALGITMHKKSPLCLVASHYTC

SEQ ID NO: 80 - DNA, 190 bp, Nicotiana tabacum
atgcaacttgggctttatgcattggaaatggctgtggcccatcttcttcattgttttacttgggaattgccagatggtatgaaaccaagtgagcttaaaatggatgatatttttggactcactgctccaaaagctaatcgactcgtggctgtgcctactccacgtttgttgtgtcccctttattaattga

SEQ ID NO: 81 - protein, 61 aa, Nicotiana tabacum
MQLGLYALEMAVAHLLHCFTWELPDGMKPSELKMDDIFGLTAPKANRLVAVPTPRLLCPLY

SEQ ID NO: 82 - DNA, 186 bp, Nicotiana tabacum
atgcaacttgggctttatgcattagaaatggcagtggcccatcttcttctttgctttacttgggaattgccagatggtatgaaaccaagtgagcttaaaatggatgatatttttggactcactgctccaagagctaatcgactcgtggctgtgcctagtccacgtttgttgtgcccactttattaa

SEQ ID NO: 83 - protein, 61 aa, Nicotiana tabacum
MQLGLYALEMAVAHLLLCFTWELPDGMKPSELKMDDIFGLTAPRANRLVAVPSPRLLCPLY

SEQ ID NO: 84 - DNA, 186 bp, Nicotiana tabacum
atgcaacttgggctttatgcattggaaatggctgtggcccatcttcttcattgttttacttgggaattgccagatggtatgaaaccaagtgagcttaaaatggatgatatttttggactcactgctccaagagctaatcgactcgtggctgtgcctactccacgtttgttgtgtcccctttattaa

SEQ ID NO: 85 - protein, 61 aa, Nicotiana tabacum
MQLGLYALEMAVAHLLHCFTWELPDGMKPSELKMDDIFGLTAPRANRLVAVPTPRLLCPLY

SEQ ID NO: 86 - DNA, 93 bp, Nicotiana tabacum
atgctttggagtgcgagtatagtgcgcgtcagctacctaacttgtatttatagattccaagtatatgctgggtctgtgttcagagtagcatga

SEQ ID NO: 87 - protein, 30 aa, Nicotiana tabacum
MLWSASIVRVSYLTCIYRFQVYAGSVFRVA

SEQ ID NO: 88 - DNA, 93 bp, Nicotiana tabacum; identical to SEQ ID NO: 86

SEQ ID NO: 89 - protein, 30 aa, Nicotiana tabacum; identical to SEQ ID NO: 87

SEQ ID NO: 90 - DNA, 93 bp, Nicotiana tabacum
atgctttggagtgcgagtatagtgcgcgtcagctacctaacctgtatttatagattccaagtatatgctgggtctgtgttcagagtagcatga

SEQ ID NO: 91 - protein, 30 aa, Nicotiana tabacum; identical to SEQ ID NO: 87

SEQ ID NO: 92 - DNA, 177 bp, Nicotiana tabacum
attaatttttcaataccacttgttgagcttgcacttgctaatctattgtttcattataattggtcacttcctgaggggatgctacctaaggatgttgatatggaagaagctttggggattaccatgcacaagaaatctcccctttgcttagtagcttctcattataacttgttgtga

SEQ ID NO: 93 - protein, 58 aa, Nicotiana tabacum
INFSIPLVELALANLLFHYNWSLPEGMLPKDVDMEEALGITMHKKSPLCLVASHYNLL

SEQ ID NO: 94 - DNA, 183 bp, Nicotiana tabacum
atatcatttggtttggctaatgtttatttgccactagctcaattgttatatcattttgattggaaactccctactggaatcaattcaagtgacttggacatgactgagtcgtcaggagtaacttgtgctagaaagagtgatttatacttgactgctactccatatcaactttctcaagagtga

SEQ ID NO: 95 - protein, 61 aa, Nicotiana tabacum
GISFGLANVYLPLAQLLYHFDWKLPTGINSSDLDMTESSGVTCARKSDLYLTATPYQLSQE

SEQ ID NO: 96 - DNA, 93 bp, Nicotiana tabacum
atgctttggagtgcgagtatagtgcgcgtcagctacctaacttgtatttatagattccaagtatatgctgggtctgtgtccagagtagcatga

SEQ ID NO: 97 - protein, 30 aa, Nicotiana tabacum
MLWSASIVRVSYLTCIYRFQVYAGSVSRVA

SEQ ID NO: 98 - DNA, 153 bp, Nicotiana tabacum
ctgaattttgcaatgttagaggcaaaaatggcacttgcattgattctacaacactatgcttttgagctctctccatcttatgcacatgctcctcatacaattatcactctgcaacctcaacatggtgctcctttgattttgcgcaagctgtag

SEQ ID NO: 99 - protein, 50 aa, Nicotiana tabacum
LNFAMLEAKMALALILQHYAFELSPSYAHAPHTIITLQPQHGAPLILRKL

SEQ ID NO: 100 - DNA, 153 bp, Nicotiana tabacum
ctgaattttgcaatgttagaggcaaaaatggcacttgcattgattctacaacactatgcttttgagctctctccatcttatgcacacgctcctcatacaattatcactctgcaacctcaacatggtgctcctttgattttgcgcaagctgtag

SEQ ID NO: 101 - protein, 50 aa, Nicotiana tabacum; identical to SEQ ID NO: 99

SEQ ID NO: 102 - DNA, 226 bp, Nicotiana tabacum
aataattttgcaatgttggaaactaagattgccttagcaatgatcctacagcgttttgctttcgagctttctccatcttacgctcatgcacctacttatgtcgtcactcttcgacctcagtgtggtgctcacttaatcttgcaaaaattataggtccttaatctggatttcccattattgagtagtgcctaataaatcttctctatcactatttttccatctttca

SEQ ID NO: 103 - protein, 50 aa, Nicotiana tabacum
NNFAMLETKIALAMILQRFAFELSPSYAHAPTYVVTLRPQCGAHLILQKL

SEQ ID NO: 104 - DNA, 268 bp, Nicotiana tabacum
agcgaaggggtggcaaaggcaacaaaggggaaaatgacatattttccatttggtgcaggaccgcgaaaatgcattgggcaaaacttcgcgattttggaagcaaaaatggctatagctatgattctacaacgcttctccttcgagctctccccatcttatacacactctccatacactgtggtcactttgaaacccaaatatggtgctcccctaataatgcacaggctgtagtcctgtgagaatatgctatccgaggaattcagttcct

SEQ ID NO: 105 - protein, 50 aa, Nicotiana tabacum
QNFAILEAKMAIAMILQRFSFELSPSYTHSPYTVVTLKPKYGAPLIMHRL

SEQ ID NO: 106 - DNA, 237 bp, Nicotiana tabacum
agcgaaggggtggcaaaggcaacaaaggggaaaatgacatattttccatttggtgcaggaccgcgaaaatgcattgggcaaaacttcgcgattttggaagcaaaaatggctatagctatgattctacaacgcttctccttcgagctctctccatcttatacacactctccatacactgtggtcactttgaaacccaaatatggtgctcccctaataatgcacaggctgtagtcctgt

SEQ ID NO: 107 - protein, 50 aa, Nicotiana tabacum; identical to SEQ ID NO: 105

SEQ ID NO: 108 - DNA, 152 bp, Nicotiana tabacum
caaaattttgccatgttagaagcaaagatggctctgtctatgatcctgcaacgcttctcttttgaactgtctccgtcttatgcacatgcccctcagtccatattaaccgtcagccacaatatggtgctccacttattttccacaagctataa

SEQ ID NO: 109 - protein, 50 aa, Nicotiana tabacum
QNFAMLEAKMALSMILQRFSFELSPSYAHAPQSILTVQPQYGAPLIFHKL

SEQ ID NO: 110 - DNA, 153 bp, Nicotiana tabacum
ataaactttgcaatgacagaagcgaagatggctatggctatgattctgcaacgcttctcctttgagctatctccatcttacacacatgctccacagtctgtaataactatgcaaccccaatatggtgctcctcttatattgcacaaattgtaa

SEQ ID NO: 111 - protein, 50 aa, Nicotiana tabacum
INFAMTEAKMAMAMILQRFSFELSPSYTHAPQSVITMQPQYGAPLILHKL

SEQ ID NO: 112 - DNA, 153 bp, Nicotiana tabacum
ataaactttgcaatggcagaagcgaagatggctatggctatgattctgcaacgcttctcctttgagctatctccatcttacacacatgctccacagtctgtaataactatgcaaccccaatatggtgctcctcttatattgcacaaattgtaa

SEQ ID NO: 113 - protein, 50 aa, Nicotiana tabacum
INFAMAEAKMAMAMILQRFSFELSPSYTHAPQSVITMQPQYGAPLILHKL

SEQ ID NO: 114 - DNA, 153 bp, Nicotiana tabacum
caaaactttgcaatgatggaagcaaaaatggcagtagctatgatactacaaaaattttcctttgaactatccccttcttatacacatgctccatttgcaattgtgactattcatcctcagtatggtgctcctctgcttatgcgcagactttaa

SEQ ID NO: 115 - protein, 50 aa, Nicotiana tabacum
QNFAMMEAKMAVAMILQKFSFELSPSYTHAPFAIVTIHPQYGAPLLMRRL

SEQ ID NO: 116 - DNA, 153 bp, Nicotiana tabacum
caaaactttgcaatgatggaagcaaaaatggcagtagctatgatactacataaattttcctttgaactatccccttcttatacacatgctccatttgcaattgtgactattcatcctcagtatggtgctcctctgcttatgcgcagactttaa

SEQ ID NO: 117 - protein, 49 aa, Nicotiana tabacum
QNFAMMEAKMAVAMILHKFSFELPSYTHAPFAIVTIHPQYGAPLLMRRL

SEQ ID NO: 118 - DNA, 150 bp, Nicotiana tabacum
caaaattttgctatgttagaggctaaaatggcaatggctatgattctgaaaacctatgcatttgaactctctccatcttatgctcatgctcctcatccactactacttcaacctcaatatggtgctcaattaattttgtacaagttgtag

SEQ ID NO: 119 - protein, 49 aa, Nicotiana tabacum
QNFAMLEAKMAMAMILKTYAFELSPSYAHAPHPLLLQPQYGAQLILYKL

SEQ ID NO: 120 - DNA, 192 bp, Nicotiana tabacum
tatagcatggggctcaaggcgattcaagctagcttagctaatcttctacatggatttaactggtcattgcctgataatatgactcctgaggacctcaacatggatgagatttttgggctctctacacctaaaaaatttccacttgctactgtgattgagccaagactttcaccaaaactttactctgtttga

SEQ ID NO: 121 - protein, 63 aa, Nicotiana tabacum
YSMGLKAIQASLANLLHGFNWSLPDNMTPEDLNMDEIFGLSTPKKFPLATVIEPRLSPKLYSV

SEQ ID NO: 122 - DNA, 192 bp, Nicotiana tabacum
tatagcttggggctcaaggagattcaagctagcttagctaatcttctacatggatttaactggtcattgcctgataatatgactcctgaggacctcaacatggatgagatttttgggctctctacacctaaaaaatttccacttgctactgtgattgagccaagactttcaccaaaactttactctgtttga

SEQ ID NO: 123 - protein, 63 aa, Nicotiana tabacum
YSLGLKEIQASLANLLHGFNWSLPDNMTPEDLNMDEIFGLSTPKKFPLATVIEPRLSPKLYSV

SEQ ID NO: 124 - DNA, 192 bp, Nicotiana tabacum
catagcttggggctcaaggtgattcaagctagcttagctaatcttctacatggatttaactggtcattgcctgataatatgactcctgaggacctcaacatggatgagatttttgggctctctacacctaaaaaatttccacttgctactgtgattgagccaagactttcaccaaaactttactctgtttga

SEQ ID NO: 125 - protein, 63 aa, Nicotiana tabacum
HSLGLKVIQASLANLLHGFNWSLPDNMTPEDLNMDEIFGLSTPKKFPLATVIEPRLSPKLYSV

SEQ ID NO: 126 - DNA, 96 bp, Nicotiana tabacum
ctgtgctttccatgtttaatctctagttatatactggctttgaatgtgaatctgtatcataatttcttgcaaatttctccttccatttcttattaa

SEQ ID NO: 127 - protein, 31 aa, Nicotiana tabacum
LCFPCLISSYILALNVNLYHNFLQISPSISY

SEQ ID NO: 128 - DNA, 192 bp, Nicotiana tabacum
tctggacttgctcaatgtgtggttggtttagctttagcaactctagtgcagtgttttgagtggaaaagggtaagcgaagaggtggttgatttgacggaaggaaaaggtctcactatgccaaaacccgagccactcatggctaggtgcgaagctcgtgacatttttcacaaagttctttcagaaatatcttaa

SEQ ID NO: 129 - protein, 63 aa, Nicotiana tabacum
SGLAQCVVGLALATLVQCFEWKRVSEEVVDLTEGKGLTMPKPEPLMARCEARDIFHKVLSEIS

SEQ ID NO: 130 - DNA, 174 bp, Nicotiana tabacum
ttgggcttggcaacggtgcatgtgaatttgatgttggcccgaatgattcaagaatttgaatggtccgcttacccggaaaataggaaagtggattttactgagaaattggaatttactgtggtgatgaaaaatcctttaagagctaaggtcaagccaagaatgcaagtggtgtaa

SEQ ID NO: 131 - protein, 57 aa, Nicotiana tabacum
LGLATVHVNLMLARMIQEFEWSAYPENRKVDFTEKLEFTVVMKNPLRAKVKPRMQVV

SEQ ID NO: 132 - DNA, 171 bp, Nicotiana tabacum
tatgctttggctatgcttcatttagagtactttgtggctaatttggtttggcattttcgatgggaggctgtggagggagatgatgttgatctttcagaaaagctagaattcaccgttgtgatgaagaatccacttcgagctcgtatctgccccagagttaactctatttga

SEQ ID NO: 133 - protein, 56 aa, Nicotiana tabacum
YALAMLHLEYFVANLVWHFRWEAVEGDDVDLSEKLEFTVVMKNPLRARICPRVNSI

SEQ ID NO: 134 - DNA, 186 bp, Nicotiana tabacum
ggtcagcaagttggacttcttagaacaaccattttcatcgcctcattactgtctgaatataagctgaaacctcgctcacaccagaaacaagttgaactcaccgatttaaatccagcaagttggcttcattcgataaaaggcgaactgttagtcgatgcgattcctcgaaagaaggcggcattttaa

SEQ ID NO: 135 - protein, 61 aa, Nicotiana tabacum
GQQVGLLRTTIFIASLLSEYKLKPRSHQKQVELTDLNPASWLHSIKGELLVDAIPRKKAAF

SEQ ID NO: 136 - DNA, 171 bp, Nicotiana tabacum
atcacatttgctaagtttgtgaatgagctagcattggcaagattaatgttccattttgatttctcgctaccaaaaggagttaagcatgaggatttggacgtggaggaagctgctggaattactgttagaaggaagttcccccttttagccgtcgccactccatgctcgtga

SEQ ID NO: 137 - protein, 56 aa, Nicotiana tabacum
ITFAKFVNELALARLMFHFDFSLPKGVKHEDLDVEEAAGITVRRKFPLLAVATPCS

SEQ ID NO: 138 - DNA, 180 bp, Nicotiana tabacum
cagaggtatgctataaaccatttgatgctctttattgcgttgttcacggctctgattgatttcaagaggcacaaaacggacggctgtgatgatatcgcgtatattccaaccattgctccaaaggatgattgtaaagtgttcctttcacagaggtgcactcgattcccatctttttcatga

SEQ ID NO: 139 - protein, 59 aa, Nicotiana tabacum
QRYAINHLMLFIALFTALIDFKRHKTDGCDDIAYIPTIAPKDDCKVFLSQRCTRFPSFS

SEQ ID NO: 140 - DNA, 183 bp, Nicotiana tabacum
atgtcatttggtttagctaatctttacttaccattggctcaattactctatcactttgactggaaactcccaaccggaatcaagccaagagacttggacttgaccgaattatcgggaataactattgctagaaagggtgacctttacttaaatgctactccttatcaaccttctcgagagtaa

SEQ ID NO: 141 - protein, 60 aa, Nicotiana tabacum
MSFGLANLYLPLAQLLYHFDWKLPTGIKPRDLDLTELSGITIARKGDLYLNATPYQPSRE

SEQ ID NO: 142 - DNA, 174 bp, Nicotiana tabacum
ttgggcttggcaacggtgcatgtgaatttgatgttggcccgaacgattcaagaatttgaatggtccgcttacccggaaaataggaaagtggattttactgagaaattggaatttactgtggtgatgaaaaaccctttaagagctaaggtcaagccaagaatgcaagtggtgtaa

SEQ ID NO: 143 - protein, 57 aa, Nicotiana tabacum
LGLATVHVNLMLARTIQEFEWSAYPENRKVDFTEKLEFTVVMKNPLRAKVKPRMQVV

SEQ ID NO: 144 - DNA, 123 bp, Nicotiana tabacum
ttgggcttggcaacggtgcatgtgaatttgatgttggcccgaatgattcaagaatttgaatggtccgcttacccggaaaataggaaagtggatttactgagaaattggaatttactgtggtga

SEQ ID NO: 145 - protein, 40 aa, Nicotiana tabacum
LGLATVHVNLMLARMIQEFEWSAYPENRKVDLLRNWNLLW

SEQ ID NO: 146 - DNA, 171 bp, Nicotiana tabacum
atcacatttgctaagtttgtgaatgagctagcattggcaagattaatgttccattttgatttctcgctaccaaaaggagttaagcatgaggatttggacgtggaggaagctgctggaattactgttaggaggaagttcccccttttagccgtcgccactccatgctcgtga

SEQ ID NO: 147 - protein, 56 aa, Nicotiana tabacum; identical to SEQ ID NO: 137

SEQ ID NO: 148 - DNA, 171 bp, Nicotiana tabacum
atcacatttgctaagtttgtgaatgagctagcattggcaagattaatgttccattttgatttctcgctaccaaaaggagttaagcatgcggatttggacgtggaggaagctgctggaattactgttagaaggaagttcccccttttagccgtcgccactccatgctcgtga

SEQ ID NO: 149 - protein, 56 aa, Nicotiana tabacum
ITFAKFVNELALARLMFHFDFSLPKGVKHADLDVEEAAGITVRRKFPLLAVATPCS

SEQ ID NO: 150 - DNA, 153 bp, Nicotiana tabacum
caaaattttgccatgttagaagcaaagactactttggctatgatcctacaacgcttctcctttgaactgtctccatcttatgcacatgctcctcagtccataataactttgcaaccccagtatggtgctccacttattttgcataaaatatag

SEQ ID NO: 151 - protein, 50 aa, Nicotiana tabacum
QNFAMLEAKTTLAMILQRFSFELSPSYAHAPQSIITLQPQYGAPLILHKI

SEQ ID NO: 152 - DNA, 171 bp, Nicotiana tabacum
attatccttgcactgccaattcttggcattaccttgggacgcttggtgcagaactttgagttgttgcctcctccaggacagtcaaagcttgacacaacagagaaaggcgggcaattcagtctgcacattttgaagcattccaccattgtgatgaaaccaagatctttttaa

SEQ ID NO: 153 - protein, 56 aa, Nicotiana tabacum
IILALPILGITLGRLVQNFELLPPPGQSKLDTTEKGGQFSLHILKHSTIVMKPRSF

SEQ ID NO: 154 - DNA, 267 bp, Nicotiana tabacum
caaaattttgccatgttagaagcaaagactactttggctatgatcctacaacgcttctcctttgaactgtctccatcttatgcacatgctcctcagtccataataacttgcaaccccagtatggtgctccacttattttgcataaaatatagtttattacttgtaagtagtgtctcgttttatgttaagcatgagtccaaaatgttaaggcttgtagaactgcaaaatgggaatgcatttgcactcgtgcactgtagattgttgtaa

SEQ ID NO: 155 - protein, 88 aa, Nicotiana tabacum
QNFAMLEAKTTLAMILQRFSFELSPSYAHAPQSIITCNPSMVLHLFCIKYSLLLVSSVSFYVKHESKMLRLVELQNGNAFALVHCRLL

SEQ ID NO: 156 - DNA, 186 bp, Nicotiana tabacum
gctgatatggggttgcgagcagtttctttggcattaggtgcacttattcaatgctttgactggcaaattgaggaagcggaaagcttggaggaaagctataattctagaatgactatgcagaacaagcctttgaaggttgtctgcactccacgcgaagatcttggccagcttctatcccaactctaa

SEQ ID NO: 157 - protein, 61 aa, Nicotiana tabacum
ADMGLRAVSLALGALIQCFDWQIEEAESLEESYNSRMTMQNKPLKVVCTPREDLGQLLSQL

SEQ ID NO: 158 - DNA, 1576 bp, Nicotiana tabacum
cttccttcctaagtcctaactaaaaatggagattcagttttctaacttagttgcattcttgctctttctctccagcatctttcttctattcaaaaaatggaaaaccagaaaactaaatttgcctcctggtccatggaaattaccttttattggaagtttacaccatttggctgtggcaggtccacttcctcaccatggcctaaaaaatttagccaaacgctatggtcctcttatgcatttacaacttggacaaattcctacactcatcatatcatcacctcaaatggcaaaagaagtactaaaaactcacgacctcgcttttgccactagaccaaagcttgtcgcggccgacatcattcactacgacagcacggacatagcattttctccgtacggtgaatactggagacaaattcgtaaaatttgcatattggaactcttgagtgccaagatggtcaaattttttagctcgattcgccaagatgagctctcgaagatgctctcatctatacgaacgacacccaatcttacagtcaatcttactgacaaaattttttggtttacgagttcggtaacttgtagatcagctttagggaagatatgtggtgaccaagacaaattgatcatttttatgagggaaataatatcattggcaggtggatttagtattgctgattttttccctacatggaaaatgattcatgatattgatggttcgaaatctaaactggtgaaagcacatcgtaagattgatgaaattttgggaaatgttgttgatgagcacaaaaagaacagagcagatggcaagaagggtaatggtgaatttggtggtgaagatttgattgatgtattgttaagagttagagaaagtggagaagttcaaattcctatcacaaatgacaatatcaaatcaatattaatcgacatgttctctgcaggatctgaaacatcatcgacgactataatttgggcattagctgaaatgatgaagaaaccaagtgttttagcaaaggcacaagctgaagtaaggcaagctttgaaggagaaaaaaggttttcaacagattgatcttgatgagctaaaatatctcaagttagtaatcaaagaaaccttaagaatgcaccctccaattcctctattagttcctagagaatgtatggaggatacaaagattgatggttacaatatacctttcaaaacaagagtcatagttaatgcatgggcaatcggacgagatccagaaagttgggatgaccccgaaagctttatgccagagagatttgagaatagttctattgactttcttggaaatcatcatcagtttataccatttggtgcaggaagaaggatttgtccgggaatgctatttggtttagctaatgttggacaacctttagctcagttactttatcacttcgattggaaactccctaatggacaaagtcatgagaatttcgacatgactgagtcacctggaatttctgctacaagaaaggatgatcttgttttgattgccactccttatgattcttattaagcagtagcagaaataaaaagccggggcaaacagaaaaaa

SEQ ID NO: 159 - protein, 503 aa, Nicotiana tabacum
MEIQFSNLVAFLLFLSSIFLLFKKWKTRKLNLPPGPWKLPFIGSLHHLAVAGPLPHHGLKNLAKRYGPLMHLQLGQIPTLIISSPQMAKEVLKTHDLAFATRPKLVAADIIHYDSTDIAFSPYGEYWRQIRKICILELLSAKMVKFFSSIRQDELSKMLSSIRTTPNLTVNLTDKIFWFTSSVTCRSALGKICGDQDKLIIFMREIISLAGGFSIADFFPTWKMIHDIDGSKSKLVKAHRKIDEILGNVVDEHKKNRADGKKGNGEFGGEDLIDVLLRVRESGEVQIPITNDNIKSILIDMFSAGSETSSTTIIWALAEMMKKPSVLAKAQAEVRQALKEKKGFQQIDLDELKYLKLVIKETLRMHPPIPLLVPRECMEDTKIDGYNIPFKTRVIVNAWAIGRDPESWDDPESFMPERFENSSIDFLGNHHQFIPFGAGRRICPGMLFGLANVGQPLAQLLYHFDWKLPNGQSHENFDMTESPGISATRKDDLVLIATPYDSY

SEQ ID NO: 160 - DNA, 1581 bp, Nicotiana tabacum
tccttcttccttcctaagtcctaactaaaaatggagattcagttttctaacttagttgcattcttgctctttctctccagcatctttcttctattcaaaaaatggaaaaccagaaaactaaatttgcctcctggtccatggaaattaccttttattggaagtttacaccatttggctgtggcaggtccacttcctcaccatggcctaaaaaatttagccaaacgctatggtcctcttatgcatttacaacttggacaaattcctacactcatcatatcatcacctcaaatggcaaaagaagtactaaaaactcacgacctcgcttttgccactagaccaaagcttgtcgtggccgacatcattcactacgacagcacggacatagcattttctccgtacggtgaatactggagacaaattcgtaaaatttgcatattggaactcttgagtgccaagatggtcaaattttttagctcgattcgccaagatgagctctcgaagatgctctcatctatacgaacgacacccaatcttacagtcaatcttactgacaaaattttttggtttacgagttcggtaacttgtagatcagctttagggaagatatgtggtgaccaagacaaattgatcatttttatgagggaaataatatcattggcaggtggatttagtattgctgattttttccctacatggaaaatgattcatgatattgatggttcgaaatctaaactggtgaaagcacatcgtaagattgatgaaattttgggaaatgttgttgatgagcacaaaaagaacagagcagatggcaagaagggtaatggtgaatttggtggtgaagatttgattgatgtattgttaagagttagagaaagtggagaagttcaaattcctatcacaaatgacaatatcaaatcaatattaatcgacatgttctctgcgggatctgaaacatcatcgacgactataatttgggcattagctgaaatgatgaagaaaccaagtgttttagcaaaggcacaagctgaagtaaggcaagctttgaaggagaaaaaaggttttcaacagattgatcttgatgagctaaaatatctcaagttagtaatcaaagaaaccttaagaatgcaccctccaattcctctattagttcctagagaatgtatggaggatacaaagattgatggttacaatatacctttcaaaacaagagtcatagttaatgcatgggcaatcggacgagatccagaaagttgggatgaccccgaaagctttatgccagagagatttgagaatagttctattgactttcttggaaatcatcatcagtttataccatttggtgcaggaagaaggatttgtccgggaatgctatttggtttagctaatgttggacaacctttagctcagttactttatcacttcgattggaaactccctaatggacaaagtcatgagaatttcgacatgactgagtcacctggaatttctgctacaagaaaggatgatcttgttttgattgccactccttatgattcttattaagcagtagcagaaataaaaagccggggcaaacagaaaaaa

SEQ ID NO: 161 - protein, 503 aa, Nicotiana tabacum
MEIQFSNLVAFLLFLSSIFLLFKKWKTRKLNLPPGPWKLPFIGSLHHLAVAGPLPHHGLKNLAKRYGPLMHLQLGQIPTLIISSPQMAKEVLKTHDLAFATRPKLVVADIIHYDSTDIAFSPYGEYWRQIRKICILELLSAKMVKFFSSIRQDELSKMLSSIRTTPNLTVNLTDKIFWFTSSVTCRSALGKICGDQDKLIIFMREIISLAGGFSIADFFPTWKMIHDIDGSKSKLVKAHRKIDEILGNVVDEHKKNRADGKKGNGEFGGEDLIDVLLRVRESGEVQIPITNDNIKSILIDMFSAGSETSSTTIIWALAEMMKKPSVLAKAQAEVRQALKEKKGFQQIDLDELKYLKLVIKETLRMHPPIPLLVPRECMEDTKIDGYNIPFKTRVIVNAWAIGRDPESWDDPESFMPERFENSSIDFLGNHHQFIPFGAGRRICPGMLFGLANVGQPLAQLLYHFDWKLPNGQSHENFDMTESPGISATRKDDLVLIATPYDSY

SEQ ID NO: 162 - DNA, 1538 bp, Nicotiana tabacum
caactgcagtttgaagataccaactaaccaaaatgcagttcttcagcttggtttccattttcctatttctatcttttctctttttgttaaggaaatggaagaactcgaatagccaaaggaaaaaattgccaccaggtccatggaaactaccaatactaggaagtatgcttcatatggttggtggactaccacaccatgtccttagagatttagccaaaaaatatggaccgcttatgcaccttcaattaggtgaagtttctgcagttgtggttacttctcctgatatggcaaaagaagtactaaaaactcatgacatcgctttcgcgtctaggcctagccttttggccccggagattgtctgttacaataggtctgatcttgcgttttgcccctatggcgattattggagacaaatgcgtaaaatatgtgtcttggaagtgctcagtgccaagaatgttcggacatatagctctattaggcgcgatgaagttcttcgtctccttaattttatccggtcatcttctggtgagcctgttaatattacggaaaggatctttttgttcacaagctccatgacatgtagatcagcgtttgggcaagtattcaaggagcaagacaaatttatacaactaattaaagaagttatactcttagcaggagggtttgatgtggctgacatattcccttcatacaagtctcttcatgtgctcagtggaatgaagggtaagattatgaatgcacaccataaggtagatgctattgttgagaatgtcatcaacgagcacaagaaaaatcttgcaattgggaaaactaatggagcgttaggaggtgaagatttaattgatgttcttctaaaacttatgaatgatggaggccttcaatttcctatcaccaacgacaacatcaaagctataatctttgacatgtttgctgctggaacagagacttcatcgtcaacaattgtgtgggctatggtggaaatggtgaaaaatccaactgtatttgcgaaagctcaagcagaagtaagagatgcatttagagaaaaagaaacttttgatgaaaatgatgtggaggagctaaactatctaaagttagtcattaaagaaactctaagacttcatccaccggttccacttttgctcccaagagaatgtagggaagagacaaatataaacggctacactattcctgtaaagaccaaagtcatggttaatgtttgggcattgggaagagatccaaaatattgggatgatgcagaaacttttaagccagagagatttgagcagtgctctaaggattttgttggtaataattttgaatatcttccatttggtggtggaaggaggatttgtccagggatttcgtttggtttagctaatgcttatttgccattggctcaattactttatcactttgattgggaactccccactggaatcaaaccaagcgacttggacttgactgagttggttggagtaactgccgctagaaaaagtgacctttacttggttgcgactccttatcaacctcctcaaaac

SEQ ID NO: 163 - protein, 502 aa, Nicotiana tabacam
MQFFSLVSIFLFLSFLFLLRKWKNSNSQRKKLPPGPWKLPILGSMLHMVGGLPHHVLRDLAKKYGPLMHLQLGEVSAVVVTSPDMAKEVLKTHDIAFASRPSLLAPEIVCYNRSDLAFCPYGDYWRQMRKICVLEVLSAKNVRTYSSIRRDEVLRLLNFIRSSSGEPVNITERIFLFTSSMTCRSAFGQVFKEQDKFIQLIKEVILLAGGFDVADIFPSYKSLHVLSGMKGKIMNAHHKVDAIVENVINEHKKNLAIGKTNGALGGEDLIDVLLKLMNDGGLQFPITNDNIKAIIFDMFAAGTETSSSTIVWAMVEMVKNPTVFAKAQAEVRDAFREKETFDENDVEELNYLKLVIKETLRLHPPVPLLLPRECREETNINGYTIPVKTKVMVNVWALGRDPKYWDDAETFKPERFEQCSKDFVGNNFEYLPFGGGRRICPGISFGLANAYLPLAQLLYHFDWELPTGIKPSDLDLTELVGVTAARKSDLYLVATPYQPPQN

SEQ ID NO: 164 - DNA, 1530 bp, Nicotiana tabacum
aaaagatgtcttcattttccacatcttctgccacttctaattccaaacttccagttcgagaaatcccaggagactatggtttccccttttttggagccataaaagatagatatgactacttctacaacctcggcacagacgaattctttcttaccaaaatgcaaaaatacaactctactgtctttagaaccaacatgccaccaggtccattcattgctaaaaatcccaaagtaattgttctcctcgatgccaaaacatttcccgttcttttcgacaactctaaagtcgaaaaaatgaacgttcttgatggcacgtacgtgccatctactgatttctatggcggatatcgcccgtgtgcttatcttgatccttctgagtcaactcatgccacacttaaagggttctttttatctttaatctcccagcttcataatcaatttattcctttatttagaacctcaatttctggtcttttcgcaaatcttgagaatgagatttcccaaaatggcaaagcgaacttcaacaatatcagcgacattatgtcattcgattttgtttttcgtttgttatgtgacaagaccagtccccatgacacaaatcttggctctaatggaccaaaactctttgatatatggctgttgcctcaacttgctccattgtttagtctaggtctaaaatttgtgccgaactttctggaagatttaatgttgcatacttttcccttgccattttttctagtgagatcgaattaccagaagctttatgatgcttttagcaagcatgccgaaagtacactgaatgaagcagagaagaatgggatcaaaagagacgaagcatgccacaacttagtttttcttgcaggtttcaatgcttatggtgggatgaaagttttattccctgcactgataaagtgggtcgccaatggaggaaagagtttacacactcggctggcaaatgaaatcaggacaattatcaaagaagaatgtgggaccataactctatcagcaatcaacaagatgagtttagtaaaatcagtagtgtatgaagtattaagaattgaacctccagttccattccaatatggtaaagccaaagaagatatcataatccaaagccatgattcaactttcttagtcaagaaaggtgaaatgatctttggatatcagccttttgctacaaaagatccaaagatttttgacaaaccagaggagtttattccggagaggttcatggccgaaggggaaaaattattaaagtatgtgtattggtcaaatgcaagagagacagatgatccaacggtggacaacaaacaatgcccagcgaaaaatcttgtcgtgcttttgtgcaggttgatgttggtggaggttttcatgcgttacgacacattcacagtggagtcaacaaagctctttcttgggtcatcagtaacgttcacgactctggaaaaagcgacatgagtttcagatatcttaattgtaggctgcaaataataatgtggtcattctgcaaattattgtacttgtgctgatg

SEQ ID NO: 165 - protein, 483 aa, Nicotiana tabacum
MSSFSTSSATSNSKLPVREIPGDYGFPFFGAIKDRYDYFYNLGTDEFFLTKMQKYNSTVFRTNMPPGPFIAKNPKVIVLLDAKTFPVLFDNSKVEKMNVLDGTYVPSTDFYGGYRPCAYLDPSESTHATLKGFFLSLISQLHNQFIPLFRTSISGLFANLENEISQNGKANFNNISDIMSFDFVFRLLCDKTSPHDTNLGSNGPKLFDIWLLPQLAPLFSLGLKFVPNFLEDLMLHTFPLPFFLVRSNYQKLYDAFSKHAESTLNEAEKNGIKRDEACHNLVFLAGFNAYGGMKVLFPALIKWVANGGKSLHTRLANEIRTIIKEECGTITLSAINKMSLVKSVVYEVLRIEPPVPFQYGKAKEDIIIQSHDSTFLVKKGEMIFGYQPFATKDPKIFDKPEEFIPERFMAEGEKLLKYVYWSNARETDDPTVDNKQCPAKNLVVLLCRLMLVEVFMRYDTFTVESTKLFLGSSVTFTTLEKAT

SEQ ID NO: 166 - DNA, 1593 bp, Nicotiana tabacum
ccaaaaatggagcttcaatcttctcctttcaatttaatttctttgttcctcttcttttcttttcattttattctagtgaagaaatggaatgccaaaatcccaaagttacctccaggtccgtggaggcttccctttattggaagcctccatcacttgaagggaaaacttccacaccataatcttagagatctagcgcgaaaatatgggcctctcatgtacttacaactcggagaaattcctgtagttgtaatatcttcgccacgtgtagcaaaagctgtactaaaaactcatgatctcgcttttgcaactagaccacgattcatgtcctcagacattgtgttttacaaaagcagggacatctcttttgccccatttggtgattactggagacagatgcgtaaaatattgactcaggaactcctgagtaacaagatgctcaagtcatatagcttaatccgaaaggatgagctctcgaagctcctctcatcgattcgtttggaaacaggttctgcagtgaacataaatgaaaagcttctctggtttacgagctgcatgacctgtagattagcctttggaaaaatatgcaatgatcgggatgagttgatcatgctaattagggagatattaacattatcaggaggatttgatgtgggtgatttgttcccttcctggaaattacttcataatatgagcaacatgaaagctaggttgacgaatgtacaccacaagtatgatttagttatggagaacatcatcaatgagcaccaagagaatcatgcagcagggataaagggtaacaacgagtttggtggcgaagatatgatcgatgctctactgagggctaaggagaataatgagcttcaatttcctatcgaaaatgacaacatgaaagcagtaattctggacttgtttattgctggaactgaaacttcatatactgcaattatatgggcactatcagaattgatgaagcacccaagtgtgatggccaaggcacaagctgaagtgagaaaagtcttcaaagaaaatgaaaatttcgacgaaaatgatcttgacaagttgccatacttaaaatcagtgattaaagaaacactaaggatgcaccctccagttcctttgttagggcctagagaatgcagggaccaaacagagatcgatggctacactgtacctattaaagctagagttatggttaatgcttgggcgataggaagagatcctgaaagttgggaagatcctgaaagtttcaaaccggagcgatttgaaaatacttctgttgatcttacaggaaatcactatcagttcattcctttcggttcaggaagaagaatgtgtccaggaatgtcgtttggtttagttaacacagggcatcctttagcccagttgctctattgctttgactggaaactccctgacaaggttaatgcaaatgattttcgcactactgaaacaagtagagtttttgcagcaagcaaagatgacctctacttgattcccacaaatcacagggagcaagaatagcttaatttaatggagttcttggaagaattaaagaagaagggctatataggtgagattttttgtatggttgca

SEQ ID NO: 167 - protein, 504 aa, Nicotiana tabacum
MELQSSPFNLISLFLFFSFHFILVKKWNAKIPKLPPGPWRLPFIGSLHHLKGKLPHHNLRDLARKYGPLMYLQLGEIPVVVISSPRVAKAVLKTHDLAFATRPRFMSSDIVFYKSRDISFAPFGDYWRQMRKILTQELLSNKMLKSYSLIRKDELSKLLSSIRLETGSAVNINEKLLWFTSCMTCRLAFGKICNDRDELIMLIREILTLSGGFDVGDLFPSWKLLHNMSNMKARLTNVHHKYDLVMENIINEHQENHAAGIKGNNEFGGEDMIDALLRAKENNELQFPIENDNMKAVILDLFIAGTETSYTAIIWALSELMKHPSVMAKAQAEVRKVFKENENFDENDLDKLPYLKSVIKETLRMHPPVPLLGPRECRDQTEIDGYTVPIKARVMVNAWAIGRDPESWEDPESFKPERFENTSVDLTGNHYQFIPFGSGRRMCPGMSFGLVNTGHPLAQLLYCFDWKLPDKVNANDFRTTETSRVFAASKDDLYLIPTNHREQE

SEQ ID NO: 168 - DNA, 1599 bp, Nicotiana tabacum
cttcttccaaaaatggagcttcaatcttctcctttcaatttaatttctttgttcctcttcttttcttttctttttattctagtgaagaaatggaatgccaaaatcccaaagttacctccaggtccgtggaggcttccctttattggaagcctccatcacttgaagggaaaacttccacaccataatcttagagatctagcgcgaaaatatggacctctcatgtacttacaactcggagaaattcctgtagttgtaatatcttcgccacgtgtagcaaaagctgtactaaaaactcatgatctcgcttttgcaactagaccacgattcatgtcctcagacattgtgttttacaaaagcagggacatctcttttgccccatttggtgattactggagacagatgcgtaaaatattgactcaggaactcctgagtaacaagatgctcaagtcatatagcttaatccgaaaggatgagctctcgaagctcctctcatcgattcgtttggaaacaggttctgcagtgaacataaatgaaaagcttctctggtttacgagctgcatgacctgtagattagcctttggaaaaatatgcaatgatcgggatgagttgatcatgctaattagggagatattaacattatcaggaggatttgatgtgggtgatttgttcccttcctggaaattacttcataatatgagcaacatgaaagctaggttgacgaatgtacaccacaagtatgatttagttatggagaacatcatcaatgagcaccaagagaatcatgcagcagggataaagggtaacaacgagtttggtggcgaagatatgatcgatgctctactgagggctaaggagaataatgagcttcaatttcctatcgaaaatgacaacatgaaagcagtaattctggacttgtttattgctggaactgaaacttcatatactgcaattatatgggcactatcagaattgatgaagcacccaagtgtgatggccaaggcacaagctgaagtgagaaaagtcttcaaagaaaatgaaaatttcgacgaaaatgatcttgacaagttgccatacttaaaatcagtgattaaagaaacactaaggatgcaccctccagttcctttgttagggcctagagaatgcagggaccaaacagagatcgatggctacactgtacctattaaagctagagttatggttaatgcttgggcgataggaagagatcctgaaagttgggaagatcctgaaagtttcaaaccggagcgatttgaaaatacttctgttgatcttacaggaaatcactatcagttcattcctttcggttcaggaagaagaatgtgtccaggaatgtcgtttggtttagttaacacagggcatcctttagcccagttgctctattgctttgactggaaactccctgacaaggttaatgcaaatgattttcgcactactgaaacaagtagagtttttgcagcaagcaaagatgacctctacttgattcccacaaatcacagggagcaagaatagcttaatttaatggagttcttggaagaattaaagaagaagggctatataggtgagattttttgtatggttgca

SEQ ID NO: 169 - protein, 504 aa, Nicotiana tabacum
MELQSSPFNLISLFLFFSFLFILVKKWNAKIPKLPPGPWRLPFIGSLHHLKGKLPHHNLRDLARKYGPLMYLQLGEIPVVVISSPRVAKAVLKTHDLAFATRPRFMSSDIVFYKSRDISFAPFGDYWRQMRKILTQELLSNKMLKSYSLIRKDELSKLLSSIRLETGSAVNINEKLLWFTSCMTCRLAFGKICNDRDELIMLIREILTLSGGFDVGDLFPSWKLLHNMSNMKARLTNVHHKYDLVMENIINEHQENHAAGIKGNNEFGGEDMIDALLRAKENNELQFPIENDNMKAVILDLFIAGTETSYTAIIWALSELMKHPSVMAKAQAEVRKVFKENENFDENDLDKLPYLKSVIKETLRMHPPVPLLGPRECRDQTEIDGYTVPIKARVMVNAWAIGRDPESWEDPESFKPERFENTSVDLTGNHYQFIPFGSGRRMCPGMSFGLVNTGHPLAQLLYCFDWKLPDKVNANDFRTTETSRVFAASKDDLYLIPTNHREQE

SEQ ID NO: 170 - DNA, 1564 bp, Nicotiana tabacum
ctttctttcttgtaccgagatggagtttcaacacttggtttcgttcttgctattcatctccttcatctttcttctaattcaaaaatggaggaaatcgaaaaagctgccacctggtccgtggaggctacctattattggaagtgtgcatcacttgacaagtggagtaccacatcgagttctcagaaatttatcacaaaaatttggcccgatcatgtacttgcagctcggggaagttcccacagtagttgtatcctccccacacatggccaaacaaattttaaaaactcatgacctcgcttttgcatctaggccagaaatcatgatgggaaaaattatttgctacgattgtaaggacattgccttttccccgtatggtgattattggagacatatgcgtaaattgagcaccttggaactacttagtgccaagatggtcaagtccttcagtccaattcgtcaagatgagctctcaagtctcctatcatccattgaatcaatgggaaatttgccaatcaacttagtagaaaaacttttatggtttatgaatgccgcgacatgtaggtcagcatttgggaaagtgtgtaaagatcaaaaagagttgataacattgattcaacgagcagaatcattatctggtggattcgagctggctgatttgttcccttcgaagaagtttctacatggtattagtgggatgcgatctaaactaatggaagctcgtaacaagatagacgcagtcttggacaacattatcaatgtgcacagagagaatcgggcaaatggaaatagttgtaatggtgagtctggaactgtagatttcatcgatgtttttctaagggtcatggagagtggcgaattaccatttccgatagaaaatgacaacatcaaagcagttattcttgacatgttcgtagcaggatctgacacatcatcttcaaccgttatttgggcattaacagaaatgatgaagaatccaaaagtcatggctaaagcacaagctgaagtgagagaagcttttaaaggaaagaaagcatgtgatgaggatactgatcttgaaaagcttcattacctaaatttagtgatcaaagagacactccgattacaccctccaactcctctacttgtcccgcgagaatgcagggaggaaacagagatagaaggattcactataccattgaaaagcaaagtcttggttaacgtatgggcaattggaagagatcccgagaattggaaaaatcctgaatgttttataccagagagattcgaaaatagttctattgagtttactggaaatcattttcaacttcttccgtttggcgctggaagacgaatttgtccaggaatgcaatttggtttggctcttgttactctgccattggctcatttgcttcacaattttgattggaaacttcccgaaggaattaatgcaagggatttggacatgacagaggcaaatgggatatctgctagaagagaaaaagatctttacttgattgctactccttatgtatcacctcttgattaactctgaaattttgctttaatgctgcttgcttgcttcact

SEQ ID NO: 171 - protein, 501 aa, Nicotiana tabacum
MEFQHLVSFLLFISFIFLLIQKWRKSKKLPPGPWRLPIIGSVHHLTSGVPHRVLRNLSQKFGPIMYLQLGEVPTVVVSSPHMAKQILKTHDLAFASRPEIMMGKIICYDCKDIAFSPYGDYWRHMRKLSTLELLSAKMVKSFSPIRQDELSSLLSSIESMGNLPINLVEKLLWFMNAATCRSAFGKVCKDQKELITLIQRAESLSGGFELADLFPSKKFLHGISGMRSKLMEARNKIDAVLDNIINVHRENRANGNSCNGESGTVDFIDVFLRVMESGELPFPIENDNIKAVILDMFVAGSDTSSSTVIWALTEMMKNPKVMAKAQAEVREAFKGKKACDEDTDLEKLHYLNLVIKETLRLHPPTPLLVPRECREETEIEGFTIPLKSKVLVNVWAIGRDPENWKNPECFIPERFENSSIEFTGNHFQLLPFGAGRRICPGMQFGLALVTLPLAHLLHNFDWKLPEGINARDLDMTEANGISARREKDLYLIATPYVSPLD

SEQ ID NO: 172 - DNA, 1560 bp, Nicotiana tabacum
ctttcttgtaccgagatggagtttcaacacttggtttcgttcttgctattcatctccttcatctttcttctaattcaaaaatggaggaaatcgaaaaagctgccacctggtccgtggaggctacctattattggaagtgtgcatcacttgacaagtggagtaccacatcgagttctcagaaatttatcacaaaaatttggcccgatcatgtacttgcagctcggggaagttcccacagtagttgtatcctccccacacatggccaaacaaattttaaaaactcatgacctcgcttttgcatctaggccagaaatcatgatgggaaaaattatttgctacgattgtaaggacattgccttttccccgtatggtgattattggagacatatgcgtaaattgagcaccttggaactacttagtgccaagatggtcaagtccttcagtccaattcgtcaagatgagctctcaagtctcctatcatccattgaatcaatgggaaatttgccaatcaacttagtagaaaaacttttatggtttatgaatgccgcgacatgtaggtcagcatttgggaaagtgtgtaaagatcaaaaagagttgataacattgattcaacgagcagaatcattatctggtggattcgagctggctgatttgttcccttcgaagaagtttctacatggtattagtgggatgcgatctaaactaatggaagctcgtaacaagatagacgcagtcttggacaacattatcaatgtgcacagagagaatcgggcaaatggaaatagttgtaatggtgagtctggaactgtagatttcatcgatgtttttctaagggtcatggagagtggcgaattaccatttccgatagaaaatgacaacatcaaagcagttattcttgacatgttcgtagcaggatctgacacatcatcttcaaccgttatttgggcattaacagaaacgatgaagaatccaaaagtcatggctaaagcacaagctgaagtgagagaagcttttaaaggaaagaaagcatgtgatgaggatactgatcttgaaaagcatcattacctaaatttagtgatcaaagagacactccgattacaccctccaactcctctacttgtcccgcgagaatgcagggaggaaacagagatagaaggattcactataccattgaaaagcaaagtcttggttaacgtatgggcaattggaagagatcccgagaattggaaaaatcctgaatgttttataccagagagattcgaaaatagttctattgagtttactggaaatcattttcaacttcttccgtttggcgctggaagacgaatttgtccaggaatgcaatttggtttggctcttgttactctgccattggctcatttgcttcacaattttgattggaaacttcccgaaggaattaatgcaagggatttggacatgacagaggcaaatgggatatctgctagaagagaaaaagatctttacttgattgctactccttatgtatcacctcttgattaactctgaaattttgctttaatgctgcttgcttgcttcact

SEQ ID NO: 173 - protein, 501 aa, Nicotiana tabacum
MEFQHLVSFLLFISFIFLLIQKWRKSKKLPPGPWRLPIIGSVHHLTSGVPHRVLRNLSQKFGPIMYLQLGEVPTVVVSSPHMAKQILKTHDLAFASRPEIMMGKIICYDCKDIAFSPYGDYWRHMRKLSTLELLSAKMVKSFSPIRQDELSSLLSSIESMGNLPINLVEKLLWFMNAATCRSAFGKVCKDQKELITLIQRAESLSGGFELADLFPSKKFLHGISGMRSKLMEARNKIDAVLDNIINVHRENRANGNSCNGESGTVDFIDVFLRVMESGELPFPIENDNIKAVILDMFVAGSDTSSSTVIWALTETMKNPKVMAKAQAEVREAFKGKKACDEDTDLEKHHYLNLVIKETLRLHPPTPLLVPRECREETEIEGFTIPLKSKVLVNVWAIGRDPENWKNPECFIPERFENSSIEFTGNHFQLLPFGAGRRICPGMQFGLALVTLPLAHLLHNFDWKLPEGINARDLDMTEANGISARREKDLYLIATPYVSPLD

SEQ ID NO: 174 - DNA, 1552 bp, Nicotiana tabacum
caaaaacaaaattccaatggttaacatgttcactccaattatatacgctcctctccttttagctttttacattatcacaaaacatttcttacgcaaactcagaaataatccaccagctccatttcttactttcccctttattggccatctttatctcttcaaaaaaccacttcaacgtaccttagccaaaatctccgaacgttatggctctgttcttctactcgaattcggttcacgaaaagtacttttggtttcttcaccatctgcagctgaagaatgcttaacaaaaaacgatattattttcgcgaatcgtcctcttttgatggctggaaaacatcttggatataattttacatctttggcttggagttcgtacggagatcattggagaaatctgcgaaggattacttcagttgagatgttttcgactcatcgtcttcaaatgctacatgggattcgtattgatgaagtgaaatctatggttaagaggctcaattcctctgccatagctgaaaaatctgtggatatgaagtctatgttttttgagctgatgctcaatgttatgatgaggacaattgctggaaaaagatattacggtgagaatgtggaggacattgaggaagctacgagattcaaaggtttggtgcaagagactttcaggattggcggggcgacgaatattggcgactttttgccggcgttgaagttattggtgaggaaattggagaaaagtttaattgtgttgcaagagaacagagatgagtttatgcaggaattaattaaagattgcagaaaaagaatggagaaagaaggtactgttactgattcagaaattgaagggaacaagaaatgtttaattgaagttttgttaacactacaagaaaatgaaccggaatactacaaagatgaaatcatcagaagccttatgcttgttctattatcagctggtacagatacttcagttgggacaatggaatgggctttatcattaatgttaaaccaccctgaaactctgaagaaagcacaagctgaaattgatgaacatataggacatgaacgtttagtggacgagtcggacatcaacaacctaccttacctacgttgtataatcaacgagacattccgaatgtaccctgcaggaccactactagtcccacacgagtcgtcagaggaaaccaccgtaggaggctaccgtgtacccggaggaaccatgttacttgtgaatttgtgggcaattcacaatgatccaaagctatgggatgaaccaagaaagtttaaaccagaaagatttcaaggactagatggtgttagagatggttacaaaatgatgccttttggttctggacgaaggagttgtcctggagaaggattggctgttcgaatggttgccttgtcattgggatgtattattcaatgttttgattggcaacgaatcggcgaagaattggttgatatgactgaaggaactggacttactttgcctaaagctcaacctttggtggccaagtgtagcccacgacctaaaatggctaatcttctctctcagatttga

SEQ ID NO: 175 - protein, 511 aa, Nicotiana tabacum
MVNMFTPIIYAPLLLAFYIITKHFLRKLRNNPPAPFLTFPFIGHLYLFKKPLQRTLAKISERYGSVLLLEFGSRKVLLVSSPSAAEECLTKNDIIFANRPLLMAGKHLGYNFTSLAWSSYGDHWRNLRRITSVEMFSTHRLQMLHGIRIDEVKSMVKRLNSSAIAEKSVDMKSMFFELMLNVMMRTIAGKRYYGENVEDIEEATRFKGLVQETFRIGGATNIGDFLPALKLLVRKLEKSLIVLQENRDEFMQELIKDCRKRMEKEGTVTDSEIEGNKKCLIEVLLTLQENEPEYYKDEIIRSLMLVLLSAGTDTSVGTMEWALSLMLNHPETLKKAQAEIDEHIGHERLVDESDINNLPYLRCIINETFRMYPAGPLLVPHESSEETTVGGYRVPGGTMLLVNLWAIHNDPKLWDEPRKFKPERFQGLDGVRDGYKMMPFGSGRRSCPGEGLAVRMVALSLGCIIQCFDWQRIGEELVDMTEGTGLTLPKAQPLVAKCSPRPKMANLLSQI

SEQ ID NO: 176 - DNA, 1675 bp, Nicotiana tabacum
caaaaacaaaattccaatggttaacatgttcactccaattatatacgctcctctccttttagctttttacattatcacaaaacatttcttacgcaaactcagaaataacccaccagctccatttcttactttcccctttattggccatctttatctcttcaaaaaaccacttcaacgtaccttagccaaaatctccgaacgttatggctctgttcttctactcgaattcggttcacgaaaagtacttttggtttcttcaccatctgcagctgaagaatgcttaacaaaaaacgatattattttcgcgaatcgtcctcttttgatggctggaaaacatcttggatataattttacttctttggcttggagttcgtacggagatcactggagaaatcttcgtaggattacttcagttgagatgttttcgactcatcgtcttcaaatgctacatggaattcgtattgatgaagtgaaatctatggttaagaggctcaattcctctgccatagctgaaaaatctgtggatatgaagtctatgttttttgagctgatgctcaatgttatgatgaggacaattgctggaaaaagatattacggtgagaatgtggaggacattgaggaagctacgagattcaaaggtttggtgcaagagactttcaggattggcggggcgacgaatattggcgactttttgccggcgttgaagttattggtgaggaaattggagaaaagtttaattgtgttgcaagagaacagagatgagtttatgcaggaattaattaaagattgcagaaaaagaatggagaaagaaggtactgttactgattcagaaattgaagggaacaagaaatgtttaattgaagttttgttaacactacaagaaaatgaaccggaatactacaaagatgaaatcatcagaagccttatgcttgttctattatcagctggtacagatacttcagttgggacaatggaatgggctttatcattaatgttaaaccaccctgaaactctgaagaaagcacaagctgaaattgatgaacatataggacatgaacgtttagtggacgagtcggacatcaacaacctaccttacctacgttgtataatcaacgagacattccgaatgtaccctgcaggaccactactagtcccacacgagtcgtcagaggaaaccaccgtaggaggctaccgtgtacccggaggaaccatgttacttgtgaatttgtgggctattcacaatgatccaaagctatgggatgaaccaagaaagtttaagccagaaagatttgaaggactagaaggtgttagagacggttacaaaatgatgccttttggttctggacgaaggagttgtcctggagaaggattggctattcgaatggttgcattgtcattgggatgtattattcaatgctttgattggcaacgacttggggaaggattggttgataagactgaaggaactggacttactttgcctaaagctcaacctttagtggccaagtgtagcccacgacctataatggctaatcttctttctcagatttgaacataattggtttctaccaaacatccccaaactagaatattattattggttacatatacaatgtaatcaattttgaaccatattatatctcaatgtattcctttttaaaaaaaaaaaaaaaaa

SEQ ID NO: 177 - protein, 511 aa, Nicotiana tabacum
MVNMFTPIIYAPLLLAFYIITKHFLRKLRNNPPAPFLTFPFIGHLYLFKKPLQRTLAKISERYGSVLLLEFGSRKVLLVSSPSAAEECLTKNDIIFANRPLLMAGKHLGYNFTSLAWSSYGDHWRNLRRITSVEMFSTHRLQMLHGIRIDEVKSMVKRLNSSAIAEKSVDMKSMFFELMLNVMMRTIAGKRYYGENVEDIEEATRFKGLVQETFRIGGATNIGDFLPALKLLVRKLEKSLIVLQENRDEFMQELIKDCRKRMEKEGTVTDSEIEGNKKCLIEVLLTLQENEPEYYKDEIIRSLMLVLLSAGTDTSVGTMEWALSLMLNHPETLKKAQAEIDEHIGHERLVDESDINNLPYLRCIINETFRMYPAGPLLVPHESSEETTVGGYRVPGGTMLLVNLWAIHNDPKLWDEPRKFKPERFEGLEGVRDGYKMMPFGSGRRSCPGEGLAIRMVALSLGCIIQCFDWQRLGEGLVDKTEGTGLTLPKAQPLVAKCSPRPIMANLLSQI

SEQ ID NO: 178 - DNA, 1755 bp, Nicotiana tabacum
caacacgcttactatctcctaaatctccactcaaaaacaaagaagagaaagatttaaaactaataattatgaaagagatggtgcaaaacaatatgagcacttctcttcttgaaactttacaagctacgcccatgatattctacttcatcgtccctctcttctgcttattccttctctccaaatctcgccgtaaacgtttgcctccaggtccaactggctggcctctcattggtaacatgatgatgatggaccagttaactcaccgtggccttgccaaactagcccaaaaatatggtggtgtttttcaccttaaaatgggttatgttcacaaaattgtagtctctggtccagacgaagctcgccaagtattacaggaacacgacatcatattttcgaaccgtccagcgaccgtagccataagttacctaacatatgacagggcagacatggcttttgctgactatggactcttctggcggcagatgagaaaactatgtgtaatgaaactcttcagccgcaaacgagctgagtcatgggactcagttcgagacgaagcggattccatggttagaattgtaacaaccaacacaggcacagctgttaacttaggtgaacttgttttcagtctcactcgtaatattatctacagagctgcttttggaacttgttctgaagatggacaaggcgagttcattaaaattatgcaagagttttcgaagctatttggtgctttcaatatagctgattttattccatggctagggtgggttggtaagcagagtctaaatattagacttgctaaggctagagcgtcgcttgatgggttcattgattcgattattgatgaccatattattagaaagaaagcttatgttaatggcaaaaatgatggaggtgatcgagaaactgatatggtggatgagcttttagctttttacagtgaggaagcaaaagtaactgagtccgaagatttgcagaatgctatcagacttactaaggataatatcaaagctatcatcatggatgtaatgtttggagggacagaaacagtggcttctgcaatagaatgggccatggcagagcttatgaggagtcctgaagatcttaaaaaggtacaacaagagctggctaacgttgttggactcaacagaaaagttgaagaatctgactttgaaaaattaacatacttaagatgttgtctaaaagaaactctacgacttcaccctccaatccctctcctcctccatgagaccgccgaggaatccaccgtctccggctaccatattccggcaaagtcacatgttattataaattcatttgccattgggcgtgacaaaaattcatgggaagatcctgaaacttataaaccatctaggtttctcaaagaaggtgtaccagattttaaaggaggtaattttgagtttataccatttgggtcgggtcggcggtcttgccccggtatgcaacttgggctttatgcattggaaatggctgtggcccatcttcttcattgttttacttgggaattgccagatggtatgaaaccaagtgagcttaaaatggatgatatttttggactcactgctccaagagctaatcgactcgtggctgtgcctactccacgtttgttgtgtcccctttattaattgaagaaaaaaggtggggcttttacttgcatcaaagagtggtgcttgtgatttttccaccttttggttaaatatacgaattattatgatatacgaattcttgggcaca

SEQ ID NO: 179 - protein, 525 aa, Nicotiana tabacum
MKEMVQNNMSTSLLETLQATPMIFYFIVPLFCLFLLSKSRRKRLPPGPTGWPLIGNMMMMDQLTHRGLAKLAQKYGGVFHLKMGYVHKIVVSGPDEARQVLQEHDIIFSNRPATVAISYLTYDRADMAFADYGLFWRQMRKLCVMKLFSRKRAESWDSVRDEADSMVRIVTTNTGTAVNLGELVFSLTRNIIYRAAFGTCSEDGQGEFIKIMQEFSKLFGAFNIADFIPWLGWVGKQSLNIRLAKARASLDGFIDSIIDDHIIRKKAYVNGKNDGGDRETDMVDELLAFYSEEAKVTESEDLQNAIRLTKDNIKAIIMDVMFGGTETVASAIEWAMAELMRSPEDLKKVQQELANVVGLNRKVEESDFEKLTYLRCCLKETLRLHPPIPLLLHETAEESTVSGYHIPAKSHVIINSFAIGRDKNSWEDPETYKPSRFLKEGVPDFKGGNFEFIPFGSGRRSCPGMQLGLYALEMAVAHLLHCFTWELPDGMKPSELKMDDIFGLTAPRANRLVAVPTPRLLCPLY

SEQ ID NO: 180 - DNA, 1684 bp, Nicotiana tabacum
tgtgcttgtgagtgtgggagaaggccttcaatatggagataccatattacagcttaaaaattgcaatttcttcatttgcaattatctttgtactaagatgggcatggaaaatcttgaattatgtgtggttaaaaccaaaagaattggagaaatacctcagacagcagggtttcaaaggaaactcttacaaattcttgtttggggatatgaaagagatgaagaaaatgggtgaagaagctatgtctaagccaatcaatttctctcatgacatgatttggcctagagttatgccattcatccacaaaaccatcaccaattatggtaagaattgtattgtgtggtttgggccaagaccagcagtcctgatcacagacccggaacttgtaaaggaggtgctaacgaagaatttcgtctatcagaagccgcttggcaatccactcacaaagttggcagcaactggaattgcaggctatgaaacagataaatgggctacacatagaaggcttctcaatcctgcttttcaccttgacaagttgaagcatatgctacctgcattccaatttactgctagtgagatgttgagcaaattggagaaagttgtttcaccaaacggaacagagatagatgtgtggccatatttacaaactttgacaagtgatgccatttcaagaactgcgtttggaagtagttatgaagaaggaagaaagatttttgaccttcaaaaagaacaactttcactaattctagaagtttcacgcacaatatatattccaggatggaggtttttgccaacgaaaaggaacaaaaggatgaagcaaatatttaatgaagtacgagcactggtatttggaattattaagaaaaggatgagtatgattgaaaatggagaagcacctgatgatttattgggaatattattggcatccaatttaaaagaaatccaacaacatggaaacaacaagaaatttggtatgagtattgatgaggtgattgaagagtgtaaactcttctattttgctgggcaagagactacttcatctttacttgtatggactatgattttgttgtgcaaatatcctaattggcaagataaagctagagaagaggttttgcaagtgtttgggagtagggaagttgactatgacaagttgaatcagctaaaaatagtaactatgatcttaaacgaggtcttaaggttgtatccagcaggatatgtgattaatcgaatggtaaacaaagaaacaaagttagggaatttgtgtttaccagccggcgtacagctcgtgttaccaacaatgttgttgcaacatgatactgaaatatggggagatgatgcaatggagttcaatccagagagatttagtgatggaatatccaaagcaacaaaaggaaaacttgtgttttttccatttagttggggtccaagaatatgtattgggcaaaattttgctatgttagaggctaaaatggcaatggctatgattctgaaaacctatgcatttgaactctctccatcttatgctcatgctcctcatccactactacttcaacctcaatatggtgctcaattaattttgtacaagttgtagatatggtcaatttggaacttgttatggaacttttatcattgtaatcaaccatattgagggaacatggtttgaggttaaatcctcgtgtgtgtgtc

SEQ ID NO: 181 - protein, 518 aa, Nicotiana tabacum
MEIPYYSLKIAISSFAIIFVLRWAWKILNYVWLKPKELEKYLRQQGFKGNSYKFLFGDMKEMKKMGEEAMSKPINFSHDMIWPRVMPFIHKTITNYGKNCIVWFGPRPAVLITDPELVKEVLTKNFVYQKPLGNPLTKLAATGIAGYETDKWATHRRLLNPAFHLDKLKHMLPAFQFTASEMLSKLEKVVSPNGTEIDVWPYLQTLTSDAISRTAFGSSYEEGRKIFDLQKEQLSLILEVSRTIYIPGWRFLPTKRNKRMKQIFNEVRALVFGIIKKRMSMIENGEAPDDLLGILLASNLKEIQQHGNNKKFGMSIDEVIEECKLFYFAGQETTSSLLVWTMILLCKYPNWQDKAREEVLQVFGSREVDYDKLNQLKIVTMILNEVLRLYPAGYVINRMVNKETKLGNLCLPAGVQLVLPTMLLQHDTEIWGDDAMEFNPERFSDGISKATKGKLVFFPFSWGPRICIGQNFAMLEAKMAMAMILKTYAFELSPSYAHAPHPLLLQPQYGAQLILYKL

SEQ ID NO: 182 - DNA, 1697 bp, Nicotiana tabacum
ccagcaccaagacatggagaattcctgggtagttttagccttaacaggccttcttacattagtttttctctcaaagtttcttcatagtcctcgtcgtaaacaaaatcttccaccaggtccaaaaccatggcctattgttggcaatatacatcttcttggttccacccctcacagatcccttcacgaacttgcaaaaagatacggagatttaatgctactaaagttcggttcgcgcaatgtccttattttatcctccccagatatggctagagaattcttgaaaacaaatgatgccatttgggcttctcgccctgagcttgccgctggtaaatatactgcttataattattgcgacatgacatgggcacgttatggacccttttggagacaagcaaggaggatctatctcaacgagattttcaatcctaaacgtttggattcatttgagtacattcgcatagaggaaaggcataatttgatttcacgtctttttgttctctctgggaagccaattcttcttagagaccatttaactcggtacactcttacaagtataagtagaacagtattgagtggaaaatattttagcgagtcacctggccaaaattcaatgataactttgaaacaattgcaggatatgcttgataagtggtttttgcttaatggtgtgatcaatattggggactggataccttggcttgctttcttggatttgcagggttatgtcaagcaaatgaaggagttgcataggaacttcgacaaatttcataactttgtgctagatgatcacaaggctaataggggagagaagaactttgtgccaagagacatggtcgatgttttgctgcagcaagctgaggatcctaatcttgaggtcaaactcaccaatgattgtgtcaagggtctaatgcaggacttattggctggcggcacggacacctcagcaacaaccgttgaatgggctttttatgaacttcttagacaacctaagattatgaagaaagcacaacaagagctagaccttgtcatttcacaggacagatgggttcaagaaaaagattacactcaactcccttacattgagtcaatcatcaaggaaacattgaggcttcacccagtaagcaccatgcttccaccgcgcattgccttggaggattgtcatgtagcaggctatgacatacctaaaggtacaattttaattgtgaacacttggagtattggaagaaattcacagcattgggagtcaccagaagaattccttccggagaggtttgaagggaagaatattggtgtcacaggacaacattttgcgctcttgccatttggcgcgggccggagaaagtgcccaggatacagtcttgggattcgtataattagggcaactttagctaacttgttgcatggattcaactggagattgcctaatggtatgagtccagaagacattagcatggaagagatttatgggctaattacacaccccaaagtcgcacttgacgtgatgatggagcctcgacttcccaaccatctttacaaatagtggataattaaaaccattaaaatcgttttgttatatgcatgtctcatatttgtagtggtcaaaatgtttgttttctatcatggatgttcagtgcgaggttgggaatttcaagtcattaacgtgtgaaaatattttaaatttaaaaaaaaaaaaaaaa

SEQ ID NO: 183 - protein, 508 aa, Nicotiana tabacum
MENSWVVLALTGLLTLVFLSKFLHSPRRKQNLPPGPKPWPIVGNIHLLGSTPHRSLHELAKRYGDLMLLKFGSRNVLILSSPDMAREFLKTNDAIWASRPELAAGKYTAYNYCDMTWARYGPFWRQARRIYLNEIFNPKRLDSFEYIRIEERHNLISRLFVLSGKPILLRDHLTRYTLTSISRTVLSGKYFSESPGQNSMITLKQLQDMLDKWFLLNGVINIGDWIPWLAFLDLQGYVKQMKELHRNFDKFHNFVLDDHKANRGEKNFVPRDMVDVLLQQAEDPNLEVKLTNDCVKGLMQDLLAGGTDTSATTVEWAFYELLRQPKIMKKAQQELDLVISQDRWVQEKDYTQLPYIESIIKETLRLHPVSTMLPPRIALEDCHVAGYDIPKGTILIVNTWSIGRNSQHWESPEEFLPERFEGKNIGVTGQHFALLPFGAGRRKCPGYSLGIRIIRATLANLLHGFNWRLPNGMSPEDISMEEIYGLITHPKVALDVMMEPRLPNHLYK

SEQ ID NO: 184 - DNA, 1631 bp, Nicotiana tabacum
actgttcaaatcacagtaacagcatcttgtgctgccataataattactctagtggtgtgtatatggagagtgctgaattgggtttggttcagaccaaagaagctggaaaagctactgaggaaacaaggtctcaaaggcaattcctacaggattttgtatggggatatgaaggagctttctggtatgattaaggaagctaactccaaacccatgaatctttctgatgatattgccccaagattggtccctttctttcttgataccatcaagaaatatgggaaaaaatcctttgtatggttgggtccaaaaccgctggtttttgtcatggaccccgagcttataaaggaagtattctccaaaaactatctgtatcaaaagcctcattcaaatccattaaccaagttactggcacaaggacttgtaagccaagaggaagacaaatgggccaaacatagaaaaatcgtcactcctgccttccacctggagaagctaaagcatatgcttccagctttttgtttgagctgtactgagatgctgagcaaatgggaagacattgttgcagttgagggctcacatgagatagatatatggcctggccttcaacaattaactagtgatgtgatctctcggacagcctttggcagtagctatgaagcaggtagaaggatatttgaacttcaaaaggaacaagctcaatttcttatggaagctatacgctccgtttatattccaggctggaggtttttgccaacaaagaggaacagaagaatgaaggaaattgaaaaggatgttcaagccttagttagaggtattattgataaaagagtaaagtcaatgaaagcaggagaggtgaataatgaggatctgcttggtatattgctggaatctaattttaaagaaattgaacagcatggaaacaaggattttggaatgagcattgaagaagtcattcaagaatgcaagttattctattttgctggccaagaaactacatcagtgttgcttgtatggactctaatattgctgagcaggcatcaggattggcaagcactggccagagaagaggtgttgcaagtctttgggaatcagaaaccagattttgatggattaaatcgtctaaaaattgttacaatgatcttgtacgagtctttaaggctctatcccccagtagtgacacttacccgaaggcctaaggaagacactgtattaggagatgtatctctaccagcaggtgtgttaatctccttaccagtgatcttattgcatcacgacgaagagatatggggtaaagatgcaaagaagttcaagccagagagattcagagatggagtctcaagtgcaacaaagggtcaagtcacttttttcccatttacttggggtcccagaatatgcattggacaaaattttgccatgttagaagcaaagactactttggctatgatcctacaacgcttctcctttgaactgtctccatcttatgcacatgctcctcagtccataataactttgcaaccccagtatggtgctccacttattttgcataaaatatagtttattacttgtaagtagtgtctcgttttatgttaagcatgagtccaaaatgttaaggcttgtagaactgcaaaatggga

SEQ ID NO: 185 - protein, 461 aa, Nicotiana tabacum
MKELSGMIKEANSKPMNLSDDIAPRLVPFFLDTIKKYGKKSFVWLGPKPLVFVMDPELIKEVFSKNYLYQKPHSNPLTKLLAQGLVSQEEDKWAKHRKIVTPAFHLEKLKHMLPAFCLSCTEMLSKWEDIVAVEGSHEIDIWPGLQQLTSDVISRTAFGSSYEAGRRIFELQKEQAQFLMEAIRSVYIPGWRFLPTKRNRRMKEIEKDVQALVRGIIDKRVKSMKAGEVNNEDLLGILLESNFKEIEQHGNKDFGMSIEEVIQECKLFYFAGQETTSVLLVWTLILLSRHQDWQALAREEVLQVFGNQKPDFDGLNRLKIVTMILYESLRLYPPVVTLTRRPKEDTVLGDVSLPAGVLISLPVILLHHDEEIWGKDAKKFKPERFRDGVSSATKGQVTFFPFTWGPRICIGQNFAMLEAKTTLAMILQRFSFELSPSYAHAPQSIITLQPQYGAPLILHKI

SEQ ID NO: 186 - DNA, 1572 bp, Nicotiana tabacum
atttatctctgaaaatgcaattcttcagcttggtttccattttcctattcctatctttcctatttttgttgaggaaatggaagaactccaatagccaaagcaaaaaattgccaccaggtccatggaaaataccaatactaggaagtatgcttcatatgattggtggagaaccgcaccatgtccttagagatttagccaaaaaagatggaccacttatgcaccttcagttaggtgaaatttctgcagttgtggttacttctagggacatggcaaaagaagtgctaaaaactcatgacgtcgtttttgcatctaggcctaaaattgtagccatggacattatctgttataaccagtccgacattgcctttagcccttatggcgaccactggagacaaatgcgtaaaatttgtgtcatggaacttctcaatgcaaagaatgttcggtctttcagctccatcagacgtgatgaagtcgttcgtctcattgactctatccggtcagattcttcttcaggtgagctagttaattttacgcagaggatcatttggtttgcaagctccatgacgtgtagatcagcatttgggcaagtactcaaggggcaagacatatttgccaaaaagatcagagaagtaataggattagcagaaggctttgatgtggtagacatcttccctacatacaagtttcttcatgttctcagtgggatgaagcgtaaacttttgaatgcccaccttaaggtagacgccattgttgaggatgtcatcaacgagcacaagaaaaatcttgcagctggcaagagtaatggcgcattaggaggcgaagatctaattgatgtcctactgagacttatgaatgacacaagtcttcaatttcccatcaccaacgacaatatcaaagctgttgttgttgacatgtttgctgccggaacagaaacttcatcaacaacaactgtatgggccatggctgaaatgatgaagaatccaagtgtattcgccaaagctcaagcagaagtgcgagaagcctttagggacaaagtatcttttgatgaaaatgatgtggaggagctgaaatacttaaagttagtcattaaagaaactttgagacttcatccaccgtctccacttttggtcccaagagaatgcagggaagatacggatataaacggctacactattcctgcaaagaccaaagttatggttaatgtttgggcattgggaagagatccaaaatattgggatgacgcggaaagctttaagccagagagatttgagcaatgttctgtagatatttttggtaataattttgagtttcttccctttggcgggggacggagaatttgtcctggaatgtcatttggtttagctaatctttacttaccattggctcaattactctatcactttgactggaaactcccaaccggaatcaagccaagagacttggacttgaccgaattatcgggaataactattgctagaaagggtgacctttacttaaatgctactccttatcaaccttctcgagagtaatttactattggcataaacattttaaatttccttcatcaacctc

SEQ ID NO: 187 - protein, 504 aa, Nicotiana tabacum
MQFFSLVSIFLFLSFLFLLRKWKNSNSQSKKLPPGPWKIPILGSMLHMIGGEPHHVLRDLAKKDGPLMHLQLGEISAVVVTSRDMAKEVLKTHDVVFASRPKIVAMDIICYNQSDIAFSPYGDHWRQMRKICVMELLNAKNVRSFSSIRRDEVVRLIDSIRSDSSSGELVNFTQRIIWFASSMTCRSAFGQVLKGQDIFAKKIREVIGLAEGFDVVDIFPTYKFLHVLSGMKRKLLNAHLKVDAIVEDVINEHKKNLAAGKSNGALGGEDLIDVLLRLMNDTSLQFPITNDNIKAVVVDMFAAGTETSSTTTVWAMAEMMKNPSVFAKAQAEVREAFRDKVSFDENDVEELKYLKLVIKETLRLHPPSPLLVPRECREDTDINGYTIPAKTKVMVNVWALGRDPKYWDDAESFKPERFEQCSVDIFGNNFEFLPFGGGRRICPGMSFGLANLYLPLAQLLYHFDWKLPTGIKPRDLDLTELSGITIARKGDLYLNATPYQPSRE

SEQ ID NO: 188 - DNA, 1633 bp, Nicotiana tabacum
ataatgctttctcccatagaagccattgtaggactagtaaccttcacatttctcttcttcttcctatggacaaaaaaatctcaaaaaccttcaaaacccttaccaccgaaaatccccggaggatggccggtaatcggccatcttttccacttcaatgacgacggcgacgaccgtccattagctcgaaaactcggagacttagctgacaaatacggccccgttttcacttttcggctaggccttccccttgtcttagttgtaagcagttacgaagctgtaaaagactgtttctctacaaatgacgccattttttccaatcgtccagcttttctttacggcgattaccttggctacaataatgccatgctatttttggccaattacggaccttactggcgaaaaaatcgaaaattagttattcaggaagttctctccgctagtcgtctcgaaaaattcaaacacgtgagatttgcaagaattcaagcgagcattaagaatttatatactcgaattgatggaaattcgagtacgataaatttaactgattggttagaagaattgaattttggtctgatcgtgaagatgatcgctggaaaaaattatgaatccggtaaaggagatgaacaagtggagagatttaagaaagcgtttaaggattttatgattttatcaatggagtttgtgttatgggatgcatttccaattccattatttaaatgggtggattttcaagggcatgttaaggctatgaaaaggacttttaaagatatagattctgtttttcagaattggttaggggaacatattaataaaagagaaaaaatggaggttaatgcagaagggaatgaacaagatttcattgatgtggtgctttcaaaaatgagtaatgaatatcttggtgaaggttactctcgtgatactgtcattaaagcaacggtgtttagtttggtcttggatgcagcagacacagttgctcttcacataaattggggaatggcattattgataaacaatcaaaaggccttgacgaaagcacaagaagagatagacacaaaagttggtaaggacagatgggtagaagagagtgatattaaggatttggtatacctccaagctattgttaaagaagtgttacgattatatccaccaggacctttgttagtaccacacgaaaatgtagaagattgtgttgttagtggatatcacattcctaaagggacaagattattcgcaaacgtcatgaaactgctacgtgatcctaaactctggcctgatcctgatactttcgatccagagagattcattgctactgatattgactttcgtggtcagtactataagtatatcccgtttggttctggaagacgatcttgtccagggatgacttatgcattgcaagtggaacacttaacaatggcacatttgatccaaggtttcaattacagaactccaaatgacgagcccttggatatgaaggaaggtgcaggcataactatacgtaaggtaaatcctgtggaactgataatagcgcctcgcctggcacctgagctttattaaaacctaagatctttcatcttggttgatcattgtataatactcctaaatggatattcatttaccttttatcaattaa

SEQ ID NO: 189 - protein, 517 aa, Nicotiana tabacum
MLSPIEAIVGLVTFTFLFFFLWTKKSQKPSKPLPPKIPGGWPVIGHLFHFNDDGDDRPLARKLGDLADKYGPVFTFRLGLPLVLVVSSYEAVKDCFSTNDAIFSNRPAFLYGDYLGYNNAMLFLANYGPYWRKNRKLVIQEVLSASRLEKFKHVRFARIQASIKNLYTRIDGNSSTINLTDWLEELNFGLIVKMIAGKNYESGKGDEQVERFKKAFKDFMILSMEFVLWDAFPIPLFKWVDFQGHVKAMKRTFKDIDSVFQNWLGEHINKREKMEVNAEGNEQDFIDVVLSKMSNEYLGEGYSRDTVIKATVFSLVLDAADTVALHINWGMALLINNQKALTKAQEEIDTKVGKDRWVEESDIKDLVYLQAIVKEVLRLYPPGPLLVPHENVEDCVVSGYHIPKGTRLFANVMKLLRDPKLWPDPDTFDPERFIATDIDFRGQYYKYIPFGSGRRSCPGMTYALQVEHLTMAHLIQGFNYRTPNDEPLDMKEGAGITIRKVNPVELIIAPRLAPELY

SEQ ID NO: 190 - DNA, 1585 bp, Nicotiana tabacum
aatccataatgctttctcccatagaagccattgtaggactagtaaccttcacatttctcttcttcttcctatggacaaaaaaatctcaaaaaccttcaaaacccttaccaccgaaaatccccggaggatggccggtaatcggccatcttttccacttcaatgacgacggcgacgaccgtccattagctcgaaaactcggagacttagctgacaaatacggccccgttttcacttttcggctaggccttccccttgtcttagttgtaagcagttacgaagctgtaaaagactgtttctctacaaatgacgccattttttccaatcgtccagcttttctttacggcgattaccttggctacaataatgccatgctatttttggccaattacggaccttactggcgaaaaaatcgaaaattagttattcaggaagttctctccgctagtcgtctcgaaaaattcaaacacgtgagatttgcaagaattcaagcgagcattaagaatttatatactcgaattgatggaaattcgagtacgataaatttaactgattggttagaagaattgaattttggtctgatcgtgaagatgatcgctggaaaaaattatgaatccggtaaaggagatgaacaagtggagagatttaagaaagcgtttaaggattttatgattttatcaatggagtttgtgttatgggatgcatttccaattccattatttaaatgggtggattttcaagggcatgttaaggctatgaaaaggacttttaaagatatagattctgtttttcagaattggttagaggaacatattaataaaagagaaaaaatggaggttaatgcagaagggaatgaacaagatttcattgatgtggtgctttcaaaaatgagtaatgaatatcttggtgaaggttactctcgtgatactgtcattaaagcaacggtgtttagtttggtcttggatgcagcagacacagttgctcttcacataaattggggaatggcattattgataaacaatcaaaaggccttgacgaaagcacaagaagagatagacacaaaagttggtaaggacagatgggtagaagagagtgatattaaggatttggtatacctccaagctattgttaaagaagtgttacgattatatccaccaggacctttgttagtaccacacgaaaatgtagaagattgtgttgttagtggatatcacattcctaaagggacaagattattcgcaaacgtcatgaaactgcaacgtgatcctaaactctggtctgatcctgatactttcgatccagagagattcattgctactgatattgactttcgtggtcagtactataagtatatcccgtttggttctggaagacgatcttgtccagggatgacttatgcattgcaagtggaacacttaacaatggcacatttgatccaaggtttcaattacagaactccaaatgacgagcccttggatatgaaggaaggtgcaggcataactatacgtaaggtaaatcctgtggaactgataatagcgcctcgcctggcacctgagctttattaaaacctaagatcatcttgcttgat

SEQ ID NO: 191 - protein, 517 aa, Nicotiana tabacum; identical to SEQ ID NO: 3

SEQ ID NO: 192 - DNA, 1620 bp, Nicotiana tabacum
ctaaaactccataatggtttctcccgtagaagccattgtaggactagtaacccttacacttctcttctacttcctatggcccaaaaaatttcaaataccttcaaaaccattaccaccgaaaattcccggagggtggccggtaatcggccatcttttctacttcgatgatgacggcgacgaccgtccattagctcgaaaactcggagacttagctgacaaatacggcccggttttcactttccggctaggccttccgcttgtgttaattgtaagcagttacgaagctgtaaaagactgcttctctacaaatgacgccattttctccaatcgtccagcttttctttacggtgaataccttggctacaataatgccatgctatttttgacaaaatacggaccttattggcgaaaaaatagaaaattagtcattcaggaagttctctctgctagtcgtctcgaaaaattgaagcacgtgagatttggtaaaattcaaacgagcattaagagtttatacactcgaattgatggaaattcgagtacgataaatctaactgattggttagaagaattgaattttggtctgatcgtgaaaatgatcgctgggaaaaattatgaatccggtaaaggagatgaacaagtggagagatttaggaaagcgtataaggattttataattttatcaatggagtttgtgttatgggatgcttttccaattccattgttcaaatgggtggattttcaaggctatgttaaggccatgaaaaggacatttaaggatatagattctgtttttcagaattggttagaggaacatgtcaagaaaagagaaaaaatggaggttaatgcacaagggaatgaacaagatttcattgatgtggtgctttcaaaaatgagtaatgaatatcttgatgaaggttactctcgtgatactgtcataaaagcaacagtgtttagtttggtcttggatgctgcggacacagttgctcttcacatgaattggggaatggcattactgataaacaatcaacatgccttgaagaaagcacaagaagagatcgataagaaagttggtaaggaaagatgggtagaagagagtgatattaaggatttggtctacctccaagctattgttaaagaagtgttacgattatatccaccaggacctttattagtacctcatgaaaatgtagaggattgtgttgttagtggatatcacattcctaaagggactagactattcgcgaacgttatgaaattgcagcgcgatcctaaactctggtcaaatcctgataagtttgatccagagagattcttcgctgatgatattgactaccgtggtcagcactatgagtttatcccatttggttctggaagacgatcttgtccggggatgacttatgcattacaagtggaacacctaacaatagcacatttgatccagggtttcaattacaaaactccaaatgacgagcccttggatatgaaggaaggtgcaggattaactatacgtaaagtaaatcctgtagaagtgacaattacggctcgcctggcacctgagctttattaaaaccttagatgttttatcttgattgtactaatatatatatgcagaaaaaattg

SEQ ID NO: 193 - protein, 517 aa, Nicotiana tabacum
MVSPVEAIVGLVTLTLLFYFLWPKKFQIPSKPLPPKIPGGWPVIGHLFYFDDDGDDRPLARKLGDLADKYGPVFTFRLGLPLVLIVSSYEAVKDCFSTNDAIFSNRPAFLYGEYLGYNNAMLFLTKYGPYWRKNRKLVIQEVLSASRLEKLKHVRFGKIQTSIKSLYTRIDGNSSTINLTDWLEELNFGLIVKMIAGKNYESGKGDEQVERFRKAYKDFIILSMEFVLWDAFPIPLFKWVDFQGYVKAMKRTFKDIDSVFQNWLEEHVKKREKMEVNAQGNEQDFIDVVLSKMSNEYLDEGYSRDTVIKATVFSLVLDAADTVALHMNWGMALLINNQHALKKAQEEIDKKVGKERWVEESDIKDLVYLQAIVKEVLRLYPPGPLLVPHENVEDCVVSGYHIPKGTRLFANVMKLQRDPKLWSNPDKFDPERFFADDIDYRGQHYEFIPFGSGRRSCPGMTYALQVEHLTIAHLIQGFNYKTPNDEPLDMKEGAGLTIRKVNPVEVTITARLAPELY

SEQ ID NO: 194 - DNA, 1623 bp, Nicotiana tabacum
cgaggctccccaccaaaaaatcatttctctcgtctaaaatggatcttctcttactagagaagaccttaattggtcttttctttgccattttaatcgctttaattgtctctaaacttcgttcaaagcgttttaagcttcctccaggaccaattccagtaccagtttttggtaattggcttcaagttggtgatgatttaaaccacagaaatcttactgattatgccaaaaaatttggcgatcttttcttgttaagaatgggtcaacgtaacttagttgttgtgtcatctcctgaattagctaaagaagttttacacacacaaggtgttgaatttggttcaagaacaagaaatgttgtgtttgatatttttactggaaaaggtcaagatatggtttttactgtatatggtgaacattggagaaaaatgaggagaattatgactgtaccattttttactaataaagttgtgcaacagtatagaggggggtgggagtttgaggtggcaagtgtaattgaggatgtgaaaaaaaatcctgaatctgctactaatgggatcgtattaaggaggagattacaattaatgatgtataataatatgtttaggattatgtttgataggagatttgagagtgaagatgatcctttgtttgttaagcttaaggctttgaatggtgaaaggagtagattggctcaaagttttgagtataattatggtgattttattccaattttgaggccttttttgagaggttatttgaagatctgtaaagaagttaaggagaagaggctgcagcttttcaaagattactttgttgatgaaagaaagaagctttcaaataccaagagctcggacagcaatgccctaaaatgtgcgattgatcacattcttgaggctcaacagaagggagagatcaatgaggacaacgttctttacattgttgaaaacatcaatgttgctgcaattgaaacaacattatggtcaattgagtggggtatcgccgagctagtcaaccaccctcacatccaaaagaaactgcgcgacgagattgacacagttcttggaccaggagtgcaagtgactgaaccagacacccacaagcttccataccttcaggctgtgatcaaggaggcacttcgtctccgtatggcaattcctctattagtcccacacatgaaccttcacgacgcaaagcttggcgggtttgatattccagcagagagcaaaatcttggttaacgcttggtggttagctaacaacccggctcattggaagaaacccgaagagttcagacccgagaggttctttgaagaggagaagcatgttgaggccaatggcaatgacttcagatatcttccgtttggcgttggtaggaggagctgccctggaattatacttgcattgccaattcttggcatcactttgggacgtttggttcagaactttgagctgttgcctcctccaggccagtcgaagctcgacaccacagagaaaggtggacagttcagtctccacattttgaagcattccaccattgtgttgaaaccaaggtctttctgaactttgtgatcttattaattaaggggttctgaagaaatttgatagtgttggatattaagggcgaatt

SEQ ID NO: 195 - protein, 505 aa, Nicotiana tabacum
MDLLLLEKTLIGLFFAILIALIVSKLRSKRFKLPPGPIPVPVFGNWLQVGDDLNHRNLTDYAKKFGDLFLLRMGQRNLVVVSSPELAKEVLHTQGVEFGSRTRNVVFDIFTGKGQDMVFTVYGEHWRKMRRIMTVPFFTNKVVQQYRGGWEFEVASVIEDVKKNPESATNGIVLRRRLQLMMYNNMFRIMFDRRFESEDDPLFVKLKALNGERSRLAQSFEYNYGDFIPILRPFLRGYLKICKEVKEKRLQLFKDYFVDERKKLSNTKSSDSNALKCAIDHILEAQQKGEINEDNVLYIVENINVAAIETTLWSIEWGIAELVNHPHIQKKLRDEIDTVLGPGVQVTEPDTHKLPYLQAVIKEALRLRMAIPLLVPHMNLHDAKLGGFDIPAESKILVNAWWLANNPAHWKKPEEFRPERFFEEEKHVEANGNDFRYLPFGVGRRSCPGIILALPILGITLGRLVQNFELLPPPGQSKLDTTEKGGQFSLHILKHSTIVLKPRSF

SEQ ID NO: 196 - DNA, 1667 bp, Nicotiana tabacum
caacacgcttactatctcctaaatctccactcaaaaacaaagaagagaaagatttaaaactaataattatgaaagagatggtgcaaaacaatatgagcacttctcttcttgaaactttacaagctacgcccatgatattctacttcatcgtccctctcttctgcttattccttctctccaaatctcgccgtaaacgtttgcctccaggtccaactggctggcctctcattggtaacatgatgatgatggaccagttaactcaccgtggccttgccaaactagcccaaaaatatggtggtgtttttcaccttaaaatgggttatgttcacaaaattgtagtctctggtccagacgaagctcgccaagtattacaggaacacgacatcatattttcgaaccgtccagcgaccgtagccataagttacctaacatatgacagggcagacatggcttttgctgactatggactcttctggcggcagatgagaaaactatgtgtaatgaaactcttcagccgcaaacgagctgagtcatgggactcagttcgagacgaagcggattccatggttagaattgtaacaaccaacacaggcacagctgttaacttaggtgaacttgttttcagtctcactcgtaatattatctacagagctgcttttggaacttgttctgaagatggacaaggcgagttcattgaaattatgcaagagttttcgaagctatttggcgctttcaatatagctgattttattccatggctagggtgggttggtaagcagagtctaaatattagacttgctaaggctagagcgtcgcttgatgggttcattgattcgattattgatgaccatattattagaaagaaagcttatgttaatggcaaaaatgatggaggtgatcgagaaactgatatggtggatgagcttttagctttttacagtgaggaagcaaaagtaactgagtccgaagatttgcagaatgctatcagacttactaaggatagtatcaaagctatcatcatggatgtaatgtttggagggacagaaacagtggcttctgcaatagaatgggccatggcagagcttatgaggagtcctgaagatcttaaaaaagtacaacaagggctggctaacgttgttggactcaacagaaaagttgaagaatctgactttgaaaaattaacatacttaagatgttgtctaaaagaaactctacgacttcaccctccaatccctctcctcctccatgagaccgccgaggaatccaccgtctccggctaccatattccggcaaagtcacatgttattataaattcatttgccattgggcgtgacaaaaattcatgggaagatcctgaaacttataaaccatctaggtttctcaaagaaggtgtaccagattttaaaggaggtaattttgagtttataccatttgggtcgggtcggcggtcttgccccggtatgcaacttgggctttatgcattggaaatggctgtggcccatcttcttcattgttttacttgggaattgccagatggtatgaaaccaagtgagcttaaaatggatgatatttttggactcactgctccaagagctaatcgactcgtggctgtgcctactccacgcttgttgtgtcccctttattaattgaagaaaaaaggtggggct

SEQ ID NO: 197 - protein, 525 aa, Nicotiana tabacum
MKEMVQNNMSTSLLETLQATPMIFYFIVPLFCLFLLSKSRRKRLPPGPTGWPLIGNMMMMDQLTHRGLAKLAQKYGGVFHLKMGYVHKIVVSGPDEARQVLQEHDIIFSNRPATVAISYLTYDRADMAFADYGLFWRQMRKLCVMKLFSRKRAESWDSVRDEADSMVRIVTTNTGTAVNLGELVFSLTRNIIYRAAFGTCSEDGQGEFIEIMQEFSKLFGAFNIADFIPWLGWVGKQSLNIRLAKARASLDGFIDSIIDDHIIRKKAYVNGKNDGGDRETDMVDELLAFYSEEAKVTESEDLQNAIRLTKDSIKAIIMDVMFGGTETVASAIEWAMAELMRSPEDLKKVQQGLANVVGLNRKVEESDFEKLTYLRCCLKETLRLHPPIPLLLHETAEESTVSGYHIPAKSHVIINSFAIGRDKNSWEDPETYKPSRFLKEGVPDFKGGNFEFIPFGSGRRSCPGMQLGLYALEMAVAHLLHCFTWELPDGMKPSELKMDDIFGLTAPRANRLVAVPTPRLLCPLY

SEQ ID NO: 198 - DNA, 1620 bp, Nicotiana tabacum
gggggataagaatatggagataccatattacagcttaaaacttacaattttttcatttgcaattatctttgtactaagatgggcatggaaaatcttgaattatgtgtggttaaaaccaaaagaattggagaaatgcatcagacagcagggtttcaaaggaaactcttacaaattcttgtttggggatatgaaagagataaagaaaatgggtgaagaagctatgtctaagccaatcaatttctctcatgacatgatttggcctagagtcatgcccttcatccacaaaaccatcaccaattatggtaagaattgttttgtgtggtttgggccaagaccagcagtcctgatcacagacccggaacttgtaaaggaggtgctaacgaagaatttcgtttatcagaagccacctggcactccactcacaaaattggcagcaactggaattgcaggctatgaaacagataaatgggctacacatagaaggcttctcaatcctgcttttcaccttgacaagttgaagcatatgctacctgcattccaatttactgcttgtgagatgttgagcaaattggagaaagttgtctcaccaaatggaacagagatagatgtgtggccatatctacaaactttaacaagtgatgccatttcaagaactgcttttggcagtagttatgaagaaggaagaaagctttttgaacttcaaaaggaacaactttcactaattctagaagtgtcccgcacaatatacatcccaggatggaggtttttgccaacaaaaaggaacaaaaggatgaagcaaatatttaatgaagtacgagcgctggtattgggaattattaagaaaagattgagtatgattgaaaatggagaagctcctgatgatttattgggtatattattggcatccaatttaaaagaaatccaacaacatggaaataacaagaaatttggtatgagtattgatgaggtgattgaagagtgtaaactcttctattttgcggggcaagagacaacttcatctttacttgtatggactatgattttgttgtgcaaacatcctagttggcaagataaagctagagaagaggttttgcaagtgtttggaagtagggaagttgactatgacaagttgaatcagctaaaaatagtaactatgatcttaaacgaggtcttaaggttgtatccagcaggatatgcgattaatcgaatggtaaccaaagaaacaaagttagggaatttatgtttaccagctggggtacaactcttgttaccaacaattttgttgcaacatgatactgaaatatggggagatgatgcaatggagttcaatccagagagatttagtgatggaatatccaaagcaacaaaaggaaaacttgtgttctttccatttagttggggtccaagaatatgtattgggcaaaattttgctatgttagaggccaagatggcaatggctatgattctgaaaaactatgcatttgaactctctccatcttatgctcatgctcctcatccactactacttcaacctcaatatggtgctcaattaattttgtacaagttgtagaaatggtcaatttggaacttgttatggaacttttatcatcgtaatcaacc

SEQ ID NO: 199 - protein, 518 aa, Nicotiana tabacum
MEIPYYSLKLTIFSFAIIFVLRWAWKILNYVWLKPKELEKCIRQQGFKGNSYKFLFGDMKEIKKMGEEAMSKPINFSHDMIWPRVMPFIHKTITNYGKNCFVWFGPRPAVLITDPELVKEVLTKNFVYQKPPGTPLTKLAATGIAGYETDKWATHRRLLNPAFHLDKLKHMLPAFQFTACEMLSKLEKVVSPNGTEIDVWPYLQTLTSDAISRTAFGSSYEEGRKLFELQKEQLSLILEVSRTIYIPGWRFLPTKRNKRMKQIFNEVRALVLGIIKKRLSMIENGEAPDDLLGILLASNLKEIQQHGNNKKFGMSIDEVIEECKLFYFAGQETTSSLLVWTMILLCKHPSWQDKAREEVLQVFGSREVDYDKLNQLKIVTMILNEVLRLYPAGYAINRMVTKETKLGNLCLPAGVQLLLPTILLQHDTEIWGDDAMEFNPERFSDGISKATKGKLVFFPFSWGPRICIGQNFAMLEAKMAMAMILKNYAFELSPSYAHAPHPLLLQPQYGAQLILYKL

SEQ ID NO: 200 - DNA, 1566 bp, Nicotiana tabacum
gtcctaactaaaaatggagattcagttttctaacttagttgcattcttgctctttctctccagcatctttcttctattcaaaaaatggaaaaccagaaaactaaatttgcctcctggtccatggaaattaccttttattggaagtttacaccatttggctgtggcaggtccacttcctcaccatggcctaaaaaatttagccaaacgctatggtcctcttatgcatttacaacttggacaaattcctacactcatcatatcatcacctcaaatggcaaaagaagtactaaaaactcacgacctcgcttttgccactagaccaaagcttgtcgtggccgacatcattcactacgacagcacggacatagcattttctccgtacggtgaatactggagacaaattcgtaaaatttgcatattggaactcttgagtgccaagatggtcaaattttttagctcgattcgccaagatgagctctcgaagatgctctcatctatacgaacgacacccaatcttacagtcaatcttactgacaaaattttttggtttacgagttcggtaacttgtagatcagctttagggaagatatgtggtgaccaagacaaattgatcatttttatgagggaaataatatcattggcaggtggatttagtattgctgattttttccctacatggaaaatgattcatgatattgatggttcgaaatctaaactggtgaaagcacatcgtaagattgatgaaattttgggaaatgttgttgatgagcacaaaaagaacagagcagatggcaagaagggtaatggtgaatttggtggtgaagatttgattgatgtattgttaagagttagagaaagtggagaagttcaaattcctatcacaaatgacaatatcaaatcaatattaatcgacatgttctctgcgggatctgaaacatcatcgacgactataatttgggcattagctgaaatgatgaagaaaccaagtgttttagcaaaggcacaagctgaagtaaggcaagctttgaaggagaaaaaaggttttcaacagattgatcttgatgagctaaaatatctcaagttagtaatcaaagaaaccttaagaatgcaccctccaattcctctattagttcctagagaatgtatggaggatacaaagattgatggttacaatatacctttcaaaacaagagtcatagttaatgcatgggcaatcggacgagatccagaaagttgggatgaccccgaaagctttatgccagagagatttgagaatagttctattgactttcttggaaatcatcatcagtttataccatttggtgcaggaagaaggatttgtccgggaatgctatttggtttagctaatgttggacaacctttagctcagttactttatcacttcgattggaaactccctaatggacaaagtcatgagaatttcgacatgactgagtcacctggaatttctgctacaagaaaggatgatcttgttttgattgccactccttatgattcttattaagcagtagcagaaataaaaagccggggcaaacagaaaaaagt

SEQ ID NO: 201 - protein, 503 aa, Nicotiana tabacum; identical to SEQ ID NO: 161

SEQ ID NO: 202 - DNA, 1652 bp, Nicotiana tabacum
caactaacaaacacattgagtcctctcccaaatcactgattcaccaccaaaagtaccaacaattcaatggaaggtacaaacttgactacatatgcagcagtatttcttgatactctgtttcttttgttcctttccaaacttcttcgccagaggaaactcaatttacctccaggcccaaaaccatggccgatcatcggaaacttaaaccttattggcaatcttcctcatcgctcaatccacgaactctccctcaagtacggacccgttatgcaactccaattcgggtctttccccgttgtagttggatcctccgtcgaaatggctaagattttcctcaaatccatggatattaactttgtaggcaggcctaaaacggctgccggaaaatacacaacgtacaattattccgatattacatggtctccttacggaccatattggcgccaggcacgtaggatgtgcctaacggaattattcagcacgaaacgtctcgattcatacgagtatattcgggctgaggagttgcattctcttctccataatttgaacaaaatatcagggaaaccaattgtgttgaaagattattcgacgacgttgagtttaaatgttattagcaggatggtactggggaaaaggtatttggacgaatccgagaactcgttcgtgaatcctgaggaatttaagaagatgttggacgaattgtttttgctaaatggtgtacttaatattggagattcaattccatggattgatttcatggatttgcaaggttatgttaagaggatgaaagtagtgagcaagaaattcgacaagtttttagagcatgttattgatgagcataacattaggagaaatggagtggagaattatgttgctaaggatatggtggatgttttgttgcagctcgctgatgatccgaagttggaagttaagctggagagacatggagtcaaagcattcactcaggatatgctggctggtggaaccgagagttcagcagtgacagtggagtgggcaatttcagagctgctaaagaagccggagattttcaaaaaggctacagaagaattggatcgagtaattgggcagaatagatgggtacaagaaaaggacattccaaatcttccttacatagaggcaatagtcaaagagactatgcgactgcaccccgtggcaccaatgttggtgccacgtgagtgtcgagaagatattaaggtagcaggctacgacgttcagaaaggaactagggttctcgtgagtgtatggactattggaagagaccctacattgtgggacgagcctgaggtgttcaagccggagagattccatgaaaggtccatagatgttaaaggacatgattatgagcttttgccatttggagcggggagaagaatgtgcccgggttatagcttggggctcaaggtgattcaagctagcttagctaatcttctacatggatttaactggtcattgcctgataatatgactcctgaggacctcaacatggatgagatttttgggctctctacacctaaaaaatttccacttgctactgtgattgagccaagactttcaccaaaactttactctgtttgattcagcagttctatggttccgtcaagatagactttgttacgtttgaacctgtgctc

SEQ ID NO: 203 - protein, 509 aa, Nicotiana tabacum
MEGTNLTTYAAVFLDTLFLLFLSKLLRQRKLNLPPGPKPWPIIGNLNLIGNLPHRSIHELSLKYGPVMQLQFGSFPVVVGSSVEMAKIFLKSMDINFVGRPKTAAGKYTTYNYSDITWSPYGPYWRQARRMCLTELFSTKRLDSYEYIRAEELHSLLHNLNKISGKPIVLKDYSTTLSLNVISRMVLGKRYLDESENSFVNPEEFKKMLDELFLLNGVLNIGDSIPWIDFMDLQGYVKRMKVVSKKFDKFLEHVIDEHNIRRNGVENYVAKDMVDVLLQLADDPKLEVKLERHGVKAFTQDMLAGGTESSAVTVEWAISELLKKPEIFKKATEELDRVIGQNRWVQEKDIPNLPYIEAIVKETMRLHPVAPMLVPRECREDIKVAGYDVQKGTRVLVSVWTIGRDPTLWDEPEVFKPERFHERSIDVKGHDYELLPFGAGRRMCPGYSLGLKVIQASLANLLHGFNWSLPDNMTPEDLNMDEIFGLSTPKKFPLATVIEPRLSPKLYSV

SEQ ID NO: 204 - DNA, 1657 bp, Nicotiana tabacum
cttcttccttcctaactaaaaatggagattcagttttctaacttagttgcattcttgctctttctctccagcatctttcttgtattcaaaaaatggaaaaccagaaaactaaatttgcctcctggtccatggaaattaccttttattggaagtttacaccatttggctgtggcaggtccacttcctcaccatggcctaaaaaatttagccaaacgctatggtcctcttatgcatttacaacttggacaaattcctacactcgtcatatcatcacctcaaatggcaaaagaagtactaaaaactcacgacctcgcttttgccactagaccaaagcttgtcgtggccgacatcattcactacgacagcacggacatagcattttcgccatacggtgaatactggagacaaattcgtaaaatttgcatattggaactcttgagtgccaagatggtcaagttttttagctcgattcgccaagatgagctctcgaagatggtttcatctatacgaacgacgcccaatcttccagtcaatcttaccgacaagattttttggtttacgagttcggtaatttgtagatcagctttagggaagatatgtggtgaccaagacaaattgatcatttttatgagggaaataatatcattggcaggtggatttagtattgctgattttttccctacatggaaaatgattcatgatattgatggttcaaaatctaaactggtgaaggcacatcgtaagattgatgaaattttggaaaatgtggtaaatgagcacaaacagaatcgagcagatggtaaaaagggtaatggtgaatttggtggagaagatctgattgatgttttgttaagagttagagaaagtggagaagttcaaattccaatcacagatgacaatatcaaatcaatattaatcgacatgttctctgccggatcggaaacatcatcgacaactataatttgggcattagctgaaatgatgaagaaaccaagtgttttagcaaaggcacaagctgaagtgaggcaagctttgaaggggaagaaaattagttttcaagagattgatattgataagctaaagtatttgaagttagtgatcaaagaaactttaagaatgcaccctccaattcctctgttagtccctagagaatgtatggaagatacaaagattgatggttacaatatacctttcaaaacaagagtcattgttaatgcatgggcaattggacgagatcctcaaagttgggatgatcctgaaagctttacgccagagagatttgagaataattctattgattttcttggaaatcatcatcaatttattccatttggtgcaggaagaaggatttgtcctggaatgctatttggtttagctaatgttggacaacctttagctcagttactttatcacttcgattggaaactccctaatggacaaagtcatgagaatttcgacatgactgagtcacctggaatttctgctacaagaaaggatgatcttgttttgattgccactccttatgattcttattaagcagtagcagaaataaaaagccggggcaaacagaaaaaagtattgctgcttctaggtattttctattggataaatttcaaaattcatccacaatatttagtgtttgctagagttggttagc

SEQ ID NO: 205 - protein, 504 aa, Nicotiana tabacum
MEIQFSNLVAFLLFLSSIFLVFKKWKTRKLNLPPGPWKLPFIGSLHHLAVAGPLPHHGLKNLAKRYGPLMHLQLGQIPTLVISSPQMAKEVLKTHDLAFATRPKLVVADIIHYDSTDIAFSPYGEYWRQIRKICILELLSAKMVKFFSSIRQDELSKMVSSIRTTPNLPVNLTDKIFWFTSSVICRSALGKICGDQDKLIIFMREIISLAGGFSIADFFPTWKMIHDIDGSKSKLVKAHRKIDEILENVVNEHKQNRADGKKGNGEFGGEDLIDVLLRVRESGEVQIPITDDNIKSILIDMFSAGSETSSTTIIWALAEMMKKPSVLAKAQAEVRQALKGKKISFQEIDIDKLKYLKLVIKETLRMHPPIPLLVPRECMEDTKIDGYNIPFKTRVIVNAWAIGRDPQSWDDPESFTPERFENNSIDFLGNHHQFIPFGAGRRICPGMLFGLANVGQPLAQLLYHFDWKLPNGQSHENFDMTESPGISATRKDDLVLIATPYDSY

SEQ ID NO: 206 - DNA, 1610 bp, Nicotiana tabacum
cttcttccttcctaactaaaaatggagattcagttttctaacttagttgcattcttgctctttctctccagcatctttcttgtattcaaaaaatggaaaaccagaaaactaaatttgcctcctggtccatggaaattaccttttattggaagtttacaccatttggctgtggcaggtccacttcctcaccatggcctaaaaaatttagccaaacgctatggtcctcttatgcatttacaacttggacaaattcctacactcgtcatatcatcacctcaaatggcaaaagaagtactaaaaactcacgacctcgcttttgccactagaccaaagcttgtcgtggccgacatcattcactacgacagcacggacatagcactttcgccatacggtgaatactggagacaaattcgtaaaatttgcatattggaactcttgagtgccaagatggtcaagttttttagctcgattcgccaagatgagctctcgaagatggtttcatctatacgaacgacgcccaatcttccagtcaatcttaccgacaagattttttggtttacgagttcggtaatttgtagatcagctttagggaagatatgtggtgaccaagacaaattgatcatttttatgagggaaataatatcattggcaggtggatttagtattgctgattttttccctacatggaaaatgattcatgatattgatggttcaaaatctaaactggtgaaggcacatcgtaagattgatgaaattttggaaaatgtggtaaatgagcacaaacagaatcgagcagatggtaaaaagggtaatggtgaatttggtggagaagatctgattgatgttttgttaagagttagagaaagtggagaagttcaaattccaatcacagatgacaatatcaaatcaatattaatcgacatgttctctgccggatcggaaacatcatcgacaactataatttgggcattagctgaaatgatgaagaaaccaagtgttttagcaaaggcacaagctgaagtgagccaagctttgaaggggaagaaaattagttttcaagagattgatattgataagctaaagtatttgaagttagtgatcaaagaaactttaagaatgcaccctccaattcctctgttagtccctagagaatgtatggaagatacaaagattgatggttacaatatacctttcaaaacaagagtcattgttaatgcatgggcaattggacgagatcctcaaagttgggatgatcctgaaagctttacgccagagagatttgagaataattctattgattttcttggaaatcatcatcaatttattccatttggtgcaggaagaaggatttgtcctggaatgctatttggtttagctaatgttggacaacctttagctcagttactttatcacttcgattggaaactccctaatggacaaactcaccaaaatttcgacatgactgagtcacctggaatttctgctacaagaaaggatgatcttattttgattgccactcctgctcattcttgattaagtattgctgcttttctattggagaattttcaaaattcatccacaatatatagtgtttgctagagttggttagc

SEQ ID NO: 207 - protein, 503 aa, Nicotiana tabacum
MEIQFSNLVAFLLFLSSIFLVFKKWKTRKLNLPPGPWKLPFIGSLHHLAVAGPLPHHGLKNLAKRYGPLMHLQLGQIPTLVISSPQMAKEVLKTHDLAFATRPKLVVADIIHYDSTDIALSPYGEYWRQIRKICILELLSAKMVKFFSSIRQDELSKMVSSIRTTPNLPVNLTDKIFWFTSSVICRSALGKICGDQDKLIIFMREIISLAGGFSIADFFPTWKMIHDIDGSKSKLVKAHRKIDEILENVVNEHKQNRADGKKGNGEFGGEDLIDVLLRVRESGEVQIPITDDNIKSILIDMFSAGSETSSTTIIWALAEMMKKPSVLAKAQAEVSQALKGKKISFQEIDIDKLKYLKLVIKETLRMHPPIPLLVPRECMEDTKIDGYNIPFKTRVIVNAWAIGRDPQSWDDPESFTPERFENNSIDFLGNHHQFIPFGAGRRICPGMLFGLANVGQPLAQLLYHFDWKLPNGQTHQNFDMTESPGISATRKDDLILIATPAHS

SEQ ID NO: 208 - DNA, 1664 bp, Nicotiana tabacum
atccttcttccttcctaggtcctaactaaaaatggagattcagttttctaacttagttgcattcttgctctttctctccagcatctttcttctattcaaaaaatggaaaaccagaaaactaaatttgcctcctggtccatggaaattaccttttattggaagtttacaccatttggctgtggcaggtccacttcctcaccatggcctaaaaaatttagccaaacgctatggtcctcttatgcatttacaacttggacaaattcctacactcatcatatcatcacctcaaatggcaaaagaagtactaaaaactcacgacctcgcttttgccactagaccaaagcttgtcgtggccgacatcattcactacgacagcacggacatagcattttctccgtacggtgaatactggagacaaattcgtaaaatttgcatattggaactcttgagtgccaagatggtcaaattttttagctcgattcgccaagatgagctctcgaagatgctctcatctatacgaacgacacccaatcttacagtcaatcttactgacaaaattttttggtttacgagttcggtaacttgtagatcagctttagggaagatatgtggtgaccaagacaaattgatcatttttatgagggaaataatatcattggcaggtggatttagtattgctgattttttccctacatggaaaatgattcatgatattgatggttcgaaatctaaactggtgaaagcacatcgtaagattgatgaaattttgggaaatgttgttgatgagcacaaaaagaacagagcagatggcaagaagggtaatggtgaatttggtggtgaagatttgattgatgtattgttaagagttagagaaagtggagaagttcaaattcctatcacaaatgacaatatcaaatcaatattaatcgacatgttctctgcgggatctgaaacatcatcgacgactataatttgggcattagctgaaatgatgaagaaaccaagtgttttagcaaaggcacaagctgaagtaaggcaagctttgaaggagaaaaaaggttttcaacagattgatcttgatgagctaaaatatctcaagttagtaatcaaagaaaccttaagaatgcaccctccaattcctctattagttcctagagaatgtatggaggatacaaagattgatggttacaatatacctttcaaaacaagagtcatagttaatgcatgggcaatcggacgagatccagaaagttgggatgaccccgaaagctttatgccagagagatttgagaatagttctattgactttcttggaaatcatcatcagtttataccatttggtgcaggaagaaggatttgtccgggaatgctatttggtttagctaatgttggacaacctttagctcagttactttatcacttcgattggaaactccctaatggacaaagtcatgagaatttcgacatgactgagtcacctggaatttctgctacaagaaaggatgatcttgttttgattgccactccttatgattcttattaagcagtagcagaaataaaaagccggggcaaacagaaaaaagtattgctgcttctaggtattttctattggataaatttcaaaattcatccacaatatttagtgtttgctagagttggttagc

SEQ ID NO: 209 - protein, 503 aa, Nicotiana tabacum; identical to SEQ ID NO: 161

SEQ ID NO: 210 - DNA, 1625 bp, Nicotiana tabacum
ttcttattttgattcaaccatggagaaccaatactcctactcattctcttcctacttctacttagctatagtactgtttcttcttccaattttggtcaaatatttcttccatcggagaagaaatttacctccaagtccattttctcttccaataattggtcacctttaccttctcaagaaaactctccatctcactctaacatccttatcagctaaatatggtcctgttttatacctcaaattgggctctatgcctgtgattgttgtgtcctcaccatctgctgttgaagaatgtttaaccaagaatgatatcatattcgcaaataggcccaagaccgtggctggtgacaagtttacctacaattatactgtttatgtttgggcaccctatggccaactttggagaattcttcgccgattaactgtcgttgaactcttctcttcacatagcctacagaaaacttctatccttagagatcaagaagttgcaatatttatccgttcgttatacaaattctcaaaggatagtagcaaaaaagtcgatttgaccaactggtcttttactttggttttcaatcttatgaccaaaattattgctgggagacatattgtgaaggaggaagatgctggcaaggaaaagggcattgaaattattgaaaaacttagagggactttcttagtaactacatcattcttgaatatgtgtgatttcttgccagtattcaggtgggttggttacaaagggctggagaagaagatggcctcaattcacaatagaagaaatgaattcttgaacagcttgcttgatgaatttcgacacaagaaaagtagtgcttcacaatctaacacaactgttggaaacatggagaagaaaaccacactgattgaaaagctcttgtctcttcaagaatcagagcctgaattctacactgatgatatcatcaaaagtattatgctggtagtttttgttgcaggaacagagacctcatcaacaaccatccaatgggtaatgaggcttcttgtagctcaccctgaggcattgtataagctacgagctgacattgacagtaaagttgggaataagcgcttgctgaatgaatcagacctcaacaagcttccgtatttgcattgtgttgttaatgagacaatgagattatacactccgataccacttttattgcctcattattcaactaaagattgtattgtggaaggatatgatgtaccaaaacatacaatgttgtttgtcaacgcttgggccattcacagggatcccaaggtatgggaggagcctgacaagttcaagccagagagatttgaggcaacagaaggggaaacagaaaggttcaattacaagcttgtaccatttggaatggggagaagagcgtgccctggagctgatatggggttgcgagcagtttctttggcattaggtgcacttattcaatgctttgactggcaaattgaggaagcggaaagcttggaggaaagctataattctagaatgactatgcagaacaagcctttgaaggttgtctgcactccacgcgaagatcttggccagcttctatcccaactctaaggcaatttatcaatgccaaacgtaatcttcatctaccactatg

SEQ ID NO: 211 - protein, 520 aa, Nicotiana tabacum
MENQYSYSFSSYFYLAIVLFLLPILVKYFFHRRRNLPPSPFSLPIIGHLYLLKKTLHLTLTSLSAKYGPVLYLKLGSMPVIVVSSPSAVEECLTKNDIIFANRPKTVAGDKFTYNYTVYVWAPYGQLWRILRRLTVVELFSSHSLQKTSILRDQEVAIFIRSLYKFSKDSSKKVDLTNWSFTLVFNLMTKIIAGRHIVKEEDAGKEKGIEIIEKLRGTFLVTTSFLNMCDFLPVFRWVGYKGLEKKMASIHNRRNEFLNSLLDEFRHKKSSASQSNTTVGNMEKKTTLIEKLLSLQESEPEFYTDDIIKSIMLVVFVAGTETSSTTIQWVMRLLVAHPEALYKLRADIDSKVGNKRLLNESDLNKLPYLHCVVNETMRLYTPIPLLLPHYSTKDCIVEGYDVPKHTMLFVNAWAIHRDPKVWEEPDKFKPERFEATEGETERFNYKLVPFGMGRRACPGADMGLRAVSLALGALIQCFDWQIEEAESLEESYNSRMTMQNKPLKVVCTPREDLGQLLSQL

SEQ ID NO: 212 - DNA, 1767 bp, Nicotiana tabacum
aaccaaccttccttttcttacttagtaaaatggatattcagtcttctcctttcaacttaattgctttgctactcttcatttcatttctttttatcctattgaaaaagtggaataccaaaatcccaaagttacctccaggtccatggagacttccccttattggcagcctccatcacttgaaaggtaaactcccacaccatcatcttagagatttagcccgaaaatatggacctctcatgtatttacaacttggagaagttcctgtagttgtaatatcttcgccacgtatagcaaaagctgtactaaaaactcatgatcttgcttttgcaacgaggcctcggttcatgtcctcggacattgtgttttacaaaagcagggacatatcattcgccccatatggcgattactggagacaaatgcgtaaaatattaacacaagaactcttgagtaacaagatgctcaagtcatttagcacaatccgaaaggatgagctctcgaagctcctctcgtcgattcgtttagcaacagcttcttctgcagtgaacataaacgaaaagcttctctggtttacaagttgcatgacttgtagattagcctttggaaaaatatgcaacgatcgtgatgaattgattatgttaataagggagatattagcattatcaggaggatttgatgtgtgtgatttgttcccttcatggaaattacttcacaatatgagcaacatgaaagctagattgacgaatgttcaccataagtataatctaattatggagaatatcatcaatgagcacaaagagaatcatgcagcagggataaagggaaataacgagtttggtggcgaagatatgattgatgctttactgagggttaaggagaataatgagcttcaatttcctatcgaaaatgacaacatgaaagcagtaattctggacttgtttattgctggaactgaaacttcatatactgcaattatatgggcactatcagaattgatgaagcacccaagtgttatggccaaggcacaagctgaagtgagaaaagtcttcaaagaaaatgaaaacttggacgaaaatgatcttgacaagttgccatacttaaaatcagtgatcaaagaaacactaaggatgcatcctccagttcctttattaggacctagagaatgcagagaacaaactgagattgatggatatactgtacctcttaaagctagagtaatggttaatgcatgggcaattggaagagatcctgaaagttgggaagatcctgaaagtttcaaacccgagcgatttgaaaatatttctgttgatcttacgggaaatcactatcagttcatccctttcggttcaggaagaagaatgtgtccaggaatgtcgtttggtttagttaacactgggcatcctttagctcagttgctctatttctttgactggaaattccctcataaggttaatgcagctgattttcacactactgaaacaagtagagtttttgcagcaagcaaagatgacctctacttgattccaacaaatcacatggagcaagagtagctctaaattgaattcttgtcttggaacaataaaagaagaaactccagcttggtctacattatttctttttgctttatattagtatgggtgtgttcagtttcttatttttaagggtaccctgaaagataaagggctatataaaccagtgagactttttattggttgcaaggttttagatcaagccataagacagcatattttattcaaaaaaaaaaaaaaa

SEQ ID NO: 213 - protein, 505 aa, Nicotiana tabacum
MDIQSSPFNLIALLLFISFLFILLKKWNTKIPKLPPGPWRLPLIGSLHHLKGKLPHHHLRDLARKYGPLMYLQLGEVPVVVISSPRIAKAVLKTHDLAFATRPRFMSSDIVFYKSRDISFAPYGDYWRQMRKILTQELLSNKMLKSFSTIRKDELSKLLSSIRLATASSAVNINEKLLWFTSCMTCRLAFGKICNDRDELIMLIREILALSGGFDVCDLFPSWKLLHNMSNMKARLTNVHHKYNLIMENIINEHKENHAAGIKGNNEFGGEDMIDALLRVKENNELQFPIENDNMKAVILDLFIAGTETSYTAIIWALSELMKHPSVMAKAQAEVRKVFKENENLDENDLDKLPYLKSVIKETLRMHPPVPLLGPRECREQTEIDGYTVPLKARVMVNAWAIGRDPESWEDPESFKPERFENISVDLTGNHYQFIPFGSGRRMCPGMSFGLVNTGHPLAQLLYFFDWKFPHKVNAADFHTTETSRVFAASKDDLYLIPTNHMEQE

SEQ ID NO: 214 - DNA, 1736 bp, Nicotiana tabacum
aaccaaccttccttttcttacttagtaaaatggatattcagtcttctcctttcaacttaattgctttgctactcttcatttcatttctttttatcctattgaaaaagtggaataccaaaatcccaaagttacctccaggtccatggagacttccccttattggcagcctccatcacttgaaaggtaaactcccacaccatcatcttagagatttagcccgaaaatatggacctctcatgtatttacaacttggagaagttcctgtagttgtaatatcttcgccacgtatagcaaaagctgtactaaaaactcatgatcttgcttttgcaacgaggcctcggttcatgtcctcggacattgtgttttacaaaagcagggacatatcattcgccccatatggcgattactggagacaaatgcgtaaaatattaacacaagaactcttgagtaacaagatgctcaagtcatttagcacaatccgaaaggatgggctctcgaagctcctctcgtcgattcgtttagcaacagcttcttctgcagtgaacataaacgaaaagcttctctggtttacaagttgcatgacttgtagattagcctttggaaaaatatgcaacgatcgtgatgaattgattatgttaataagggagatattagcattatcaggaggatttgatgtgtgtgatttgttcccttcatggaaattacttcacaatatgagcaacatgaaagctagattgacgaatgttcaccataagtataatctaattatggagaatatcatcaatgagcacaaagagaatcatgcagcagggataaagggaaataacgagtttggtggcgaagatatgattgatgctttactgagggttaaggagaataatgagcttcaatttcctatcgaaaatgacaacatgaaagcagtaattctggacttgtttattgctggaactgaaacttcatatactgcaattatatgggcactatcagaattgatgaagcacccaagtgttatggccaaggcacaagctgaagtgagaaaagtcttcaaagaaaatgaaaacttggacgaaaatgatcttgacaagttgccatacttaaaatcagtgatcaaagaaacactaaggatgcatcctccagttcctttattaggacctagagaatgcagagaacaaactgagattgatggatatactgtacctcttaaagctagagtaatggttaatgcatgggcaattggaagagatcctgaaagttgggaagatcctgaaagtttcaaacccgagcgatttgaaaatatttctgttgatcttacgggaaatcactatcagttcattcctttcggttcaggaagaagaatgtgtccaggaatgtcgtttggtttagttaacactgggcatcctttagctcagttgctctatttctttgactggaaattccctcataaggttaatgcagctgattttcacactactgaaacaagtagagtttttgcagcaagcaaagatgacctctacttgattccaacaaatcacatggagcaagagtagctctaaattgaattcttgtcttggaacgataaaagaagaaactccagcttggtctacattatttctttttgctttatattagtatgggtgtgttcagtttcttgtttttaagggtaccctgaaagataaagggctatataaaccagtgagactttttattgaaaaaaaaaaaaaaaaaaaaaaaaaaaa

SEQ ID NO: 215 - protein, 505 aa, Nicotiana tabacum
MDIQSSPFNLIALLLFISFLFILLKKWNTKIPKLPPGPWRLPLIGSLHHLKGKLPHHHLRDLARKYGPLMYLQLGEVPVVVISSPRIAKAVLKTHDLAFATRPRFMSSDIVFYKSRDISFAPYGDYWRQMRKILTQELLSNKMLKSFSTIRKDELSKLLSSIRLATASSAVNINEKLLWFTSCMTCRLAFGKICNDRDELIMLIREILALSGGFDVCDLFPSWKLLHNMSNMKARLTNVHHKYNLIMENIINEHKENHAAGIKGNNEFGGEDMIDALLRVKENNELQFPIENDNMKAVILDLFIAGTETSYTAIIWALSELMKHPSVMAKAQAEVRKVFKENENLDENDLDKLPYLKSVIKETLRMHPPVPLLGPRECREQTEIDGYTVPLKARVMVNAWAIGRDPESWEDPESFKPERFENISVDLTGNHYQFIPFGSGRRMCPGMSFGLVNTGHPLAQLLYLFDWKFPHKVNAADFHTTETSRVFAASKDDLYLIPTNHMEQE

SEQ ID NO: 216 - DNA, 1823 bp, Nicotiana tabacum
aaccaaccttccttttcttacttagtaaaatggatattcagtcttctcctttcaacttaattgctttgctactcttcatttcatttctttttatcctattgaaaaagtggaataccaaaatcccaaagttacctccaggtccatggagacttccccttattggcagcctccatcacttgaaaggtaaactcccacaccatcatcttagagatttagcccgaaaatatggacctctcatgtatttacaacttggagaagttcctgtagttgtaatatcttcgccacgtatagcaaaagctgtactaaaaactcatgatcttgcttttgcaacgaggcctcggttcatgtcctcggacattgtgttttacaaaagcagggacatatcattcgccccatatggcgattactggagacaaatgcgtaaaatattaacacaagaactcttgagtaacaagatgctcaagtcatttagcacaatccgaaaggatgagctctcgaagctcctctcgtcgattcgtttagcaacagcttcttctgcagtgaacataaacgaaaagcttctctggtttacaagttgcatgacttgtagattagcctttggaaaaatatgcaacgatcgtgatgaattgattatgttaataagggagatattagcattatcaggaggatttgatgtgtgtgatttgttcccttcatggaaattacttcacaatatgagcaacatgaaagctagattgacgaatgttcaccataagtataatctaattatggagaatatcatcaatgagcacaaagagaatcatgcagcagggataaagggaaataacgagtttggtggcgaagatatgattgatgctttactgagggttaaggagaataatgagcttcaatttcctatcgaaaatgacaacatgaaagcagtaattctggacttgtttattgctggaactgaaacttcatatactgcaattatatgggcactatcagaattgatgaagcacccaagtgttatggccaaggcacaagctgaagtgagaaaagtcttcaaagaaaatgaaaacttggacgaaaatgatcttgacaagttgccatacttaaaatcagtgatcaaagaaacactaaggatgcatcctccagttcctttattaggacctagagaatgcagagaacaaactgagattgatggatatactgtacctcttaaagctagagtaatggttaatgcatgggcaattggaagagatcctgaaagttgggaagatcctgaaagtttcaaacccgagcgatttgaaaatatttctgttgatcttacgggaaatcactatcagttcattcctttcggttcaggaagaagaatgtgtccaggaatgtcgtttggtttagttaacactgggcatcctttagctcagttgctctatctctttgactggaaattccctcataaggttaatgcagctgattttcacactactgaaacaagtagagtttttgcagcaagcaaagatgacctctacttgattccaacaaatcacatggagcaagagtagctctaaattgaattcttgtcttggaacaataaaagaagaaactccagcttggtctacattatttccttttgctttatattagtatgggtgtgttcagtctcttgtttttaagggtaccctgaaagataaagggctatataaaccagtgagactttttattggttgcaaggttttagatcaagccataagacagcatattttattccaccattttctatcatgtttaataaagttcctttcgtttattgttagaaaaaaaaaaaaaaaaaaaaaaaa

SEQ ID NO: 217 - protein, 505 aa, Nicotiana tabacum; identical to SEQ ID NO: 215

SEQ ID NO: 218 - DNA, 1673 bp, Nicotiana tabacum
atatgcaactgagatttgaagaataccaactaaccaaaatgcagttcttcagcctggtttccattttcctatttctatctttcctctttttgttaagggtatggaagaactccaatagccaaagcaaaaagttgccaccaggtccatggaaactaccaatactaggaagtatgcttcatatggttggtggactaccacaccatgtccttagagatttagccaaaaaatatggaccacttatgcaccttcaattaggtgaagtttctgcggttgtggttacttctcctgatacggcaaaagaagtattaaaaactcatgacatcgcttttgcgtctaggcctagccttttggccccggagattgtctgttacaataggtctgatctagccttttgcccctatggcgactattggagacaaatgcgtaaaatatgtgtcttggaagtgctcagtgccaagaatgttcggacatttagctctattaggcggaatgaagttcttcgtctcattaattttatccggtcatcttctggtgaacctattaatgttacggaaaggatctttttgttcacaagctccatgacatgtagatcagcgtttgggcaagtgttcaaagagcaagacaaatttatacaactaattaaagaagtgatactcttagcaggagggtttgatgtggctgacatattcccttcactgaagtttcttcatgtgctcagtggaatgaagggtaagattatgaatgcacaccataaggtagatgccattgttgagaatgtcatcaatgagcacaagaaaaatcttgcaattgggaaaactaatggagcgttaggaggtgaagatttaattgatgttcttctaagacttatgaatgatggaggccttcaatttcctatcaccaacgacaacatcaaagctataatttttgacatgtttgctgccgggacagagacttcatcgtcaacaattgtgtgggctatggtagaaatggtgaaaaatccagccgtattcgcgaaagctcaagcagaagtaagagaagcatttagaggaaaagaaactttcgatgaaaatgatgtggaggagctaaactacctaaagttagtaataaaagaaactctaagacttcatccaccggttccacttttgctcccaagagaatgtagggaagagacaaatataaacggctacactattcctgtaaagaccaaagtcatggttaatgtttgggctttgggaagagatccaaaatattggaatgacgcagaaacttttatgccagagagatttgagcagtgctctaaggattttgttggtaataattttgaatatcttccatttggtggcggaaggaggatttgtcctgggatttcgtttggcttagctaatgcttatttgccattggctcaattactatatcacttcgattggaaactccctgctggaatcgaaccaagcgacttggacttgactgagttggttggagtaactgccgctagaaaaagtgacctttacttggttgcgactccttatcaacctcctcaaaagtgatttaatggtttcaagtttttatttcctagcaaaccccactattgtcctatctttcttttggtgttttcggttttatctactctaatacatgcatcttttaccatataggaatgtaccatgttgtcg

SEQ ID NO: 219 - protein, 514 aa, Nicotiana tabacum
MQLRFEEYQLTKMQFFSLVSIFLFLSFLFLLRVWKNSNSQSKKLPPGPWKLPILGSMLHMVGGLPHHVLRDLAKKYGPLMHLQLGEVSAVVVTSPDTAKEVLKTHDIAFASRPSLLAPEIVCYNRSDLAFCPYGDYWRQMRKICVLEVLSAKNVRTFSSIRRNEVLRLINFIRSSSGEPINVTERIFLFTSSMTCRSAFGQVFKEQDKFIQLIKEVILLAGGFDVADIFPSLKFLHVLSGMKGKIMNAHHKVDAIVENVINEHKKNLAIGKTNGALGGEDLIDVLLRLMNDGGLQFPITNDNIKAIIFDMFAAGTETSSSTIVWAMVEMVKNPAVFAKAQAEVREAFRGKETFDENDVEELNYLKLVIKETLRLHPPVPLLLPRECREETNINGYTIPVKTKVMVNVWALGRDPKYWNDAETFMPERFEQCSKDFVGNNFEYLPFGGGRRICPGISFGLANAYLPLAQLLYHFDWKLPAGIEPSDLDLTELVGVTAARKSDLYLVATPYQPPQK

SEQ ID NO: 220 - DNA, 1673 bp, Nicotiana tabacum
atatgcaactgagatttgaagaataccaactaaccaaaatgcagttcttcagcttggtttccattttcctatttctatctttcctctttttgttaaggatatggaagaactccaatagccaaagcaaaaagttgccaccaggtccatggaaactaccaatactaggaagtatgcttcatatggttggtggactaccacaccatgtccttagagatttagccaaaaaatatggaccacttatgcaccttcaattaggtgaagtttctgcggttgtggttacttctcctgatacggcaaaagaagtattaaaaactcatgacatcgcttttgcgtctaggcctagccttttggccccggagattgtctgttacaataggtctgatctagccttttgcccctatggcgactattggagacaaatgcgtaaaatatgtgtcttggaagtgctcagtgccaagaatgttcggacatttagctctattaggcggaatgaagttcttcgtctcattaattttatccggtcatcttctggtgaacctattaatgttacggaaaggatctttttgttcacaagctccatgacatgtagatcagcgtttgggcaagtgttcaaagagcaagacaaatttatacaactaattaaagaagtgatactcttagcaggagggtttgatgtggctgacatattcccttcactgaagtttcttcatgtgctcagtggaatgaagggtaagattatgaatgcacaccataaggtagatgccattgttgagaatgtcatcaatgagcacaagaaaaatcttgcaattgggaaaactaatggagcgttaggaggtgaagatttaattgatgttcttctaagacttatgaatgatggaggccttcaatttcctatcaccaacgacaacatcaaagccataatttttgacatgtttgctgccgggacagagacttcatcgtcaacaattgtgtgggctatggtagaaatggtgaaaaatccagccgtattcgcgaaagctcaagcagaagtaagagaagcatttagaggaaaagaaactttcgatgaaaatgatgtggaggagctaaactacctaaagttagtaataaaagaaactctaagacttcatccaccggttccacttttgctcccaagagaatgtagggaagagacaaatataaacggctacactattcctgtaaagaccaaagtcatggttaatgtttgggctttgggaagagatccaaaatattggaatgacgcagaaacttttatgccagagagatttgagcagtgctctaaggattttgttggtaataattttgaatatcttccatttggtggcggaaggaggatttgtcctgggatttcgtttggcttagctaatgcttatttgccattggctcaattactatatcacttcgattggaaactccctgctggaatcgaaccaagcgacttggacttgactgagttggttggagtaactgccgctagaaaaagtgacctttacttggttgcgactccttatcaacctcctcaaaagtgatttaatggtttcaagtttttatttcctagcaaaccccactattgtcctatctttcttttggtgttttcggttttatctactctaatacatgcatcttttaccatataggaatgtaccatgttgtcg

SEQ ID NO: 221 - protein, 514 aa, Nicotiana tabacum
MQLRFEEYQLTKMQFFSLVSIFLFLSFLFLLRIWKNSNSQSKKLPPGPWKLPILGSMLHMVGGLPHHVLRDLAKKYGPLMHLQLGEVSAVVVTSPDTAKEVLKTHDIAFASRPSLLAPEIVCYNRSDLAFCPYGDYWRQMRKICVLEVLSAKNVRTFSSIRRNEVLRLINFIRSSSGEPINVTERIFLFTSSMTCRSAFGQVFKEQDKFIQLIKEVILLAGGFDVADIFPSLKFLHVLSGMKGKIMNAHHKVDAIVENVINEHKKNLAIGKTNGALGGEDLIDVLLRLMNDGGLQFPITNDNIKAIIFDMFAAGTETSSSTIVWAMVEMVKNPAVFAKAQAEVREAFRGKETFDENDVEELNYLKLVIKETLRLHPPVPLLLPRECREETNINGYTIPVKTKVMVNVWALGRDPKYWNDAETFMPERFEQCSKDFVGNNFEYLPFGGGRRICPGISFGLANAYLPLAQLLYHFDWKLPAGIEPSDLDLTELVGVTAARKSDLYLVATPYQPPQK

SEQ ID NO: 222 - DNA, 1673 bp, Nicotiana tabacum
atatgcaactgagatttgaagaataccaactaaccaaagtgcagttcttcagcttggtttccattttcctatttctatctttcctctttttgttaaggatatggaagaactccaatagccaaagcaaaaagttgccaccaggtccatggaaactaccaatactaggaagtatgcttcatatggttggtggactaccacaccatgtccttagagatttagccaaaaaatatggaccacttatgcaccttcaattaggtgaagtttctgcggttgtggttacttctcctgatacggcaaaagaagtattaaaaactcatgacatcgcttttgcgtctaggcctagccttttggccccggagattgtctgttacaataggtctgatctagccttttgcccctatggcgactattggagacaaatgcgtaaaatatgtgtcttggaagtgctcagtgccaagaatgttcggacatttagctctattaggcggaatgaagttcttcgtctcattaattttatccggtcatcttctggtgaacctattaatgttacggaaaggatctttttgttcacaagctccatgacatgtagatcagcgtttgggcaagtgttcaaagagcaagacaaatttatacaactaattaaagaagtgatactcttagcaggagggtttgatgtggctgacatattcccttcactgaagtttcttcatgtgctcagtggaatgaagggtaagattatgaatgcacaccataaggtagatgccattgttgagaatgtcatcaatgagcacaagaaaaatcttgcaattgggaaaactaatggagcgttaggaggtgaagatttaattgatgttcctctaagacttatgaatgatggaggccttcaatttcctatcaccaacgacaacatcaaagctataatttttgacatgtttgctgccgggacggagacttcatcgtcaacaattgtgtgggctatggtagaaatggtgaaaaatccagccgtattcgcgaaagctcaagcagaagtaagagaagcatttagaggaaaagaaactttcgatgaaaatgatgtggaggagctaaactacctaaagttagtaataaaagaaactctaagacttcatccaccggttccacttttgctcccaagagaatgtagggaagagacaaatataaacggctacactattcctgtaaagaccaaagtcatggttaatgtttgggctttgggaagagatccaaaatattggaatgacgcagaaacttttatgccagagagatttgagcagtgctctaaggattttgttggtaataattttgaatatcttccatttggtggcggaaggaggatttgtcctgggatttcgtttggcttagctaatgcttatttgccattggctcaattactatatcacttcgattggaaactccctgctggaatcgaaccaagcgacttggacttgactgagttggttggagtaactgccgctagaaaaagtgacctttacttggttgcgactccttatcaacctcctcaaaagtgatttaatggtttcaagtttttatttcctagcaaaccccactattgtcctatctttcttttggtgttttcggttttatctactctaatacatgcatcttttaccatataggaatgtaccatgttgtcg

SEQ ID NO: 223 - protein, 514 aa, Nicotiana tabacum
MQLRFEEYQLTKVQFFSLVSIFLFLSFLFLLRIWKNSNSQSKKLPPGPWKLPILGSMLHMVGGLPHHVLRDLAKKYGPLMHLQLGEVSAVVVTSPDTAKEVLKTHDIAFASRPSLLAPEIVCYNRSDLAFCPYGDYWRQMRKICVLEVLSAKNVRTFSSIRRNEVLRLINFIRSSSGEPINVTERIFLFTSSMTCRSAFGQVFKEQDKFIQLIKEVILLAGGFDVADIFPSLKFLHVLSGMKGKIMNAHHKVDAIVENVINEHKKNLAIGKTNGALGGEDLIDVPLRLMNDGGLQFPITNDNIKAIIFDMFAAGTETSSSTIVWAMVEMVKNPAVFAKAQAEVREAFRGKETFDENDVEELNYLKLVIKETLRLHPPVPLLLPRECREETNINGYTIPVKTKVMVNVWALGRDPKYWNDAETFMPERFEQCSKDFVGNNFEYLPFGGGRRICPGISFGLANAYLPLAQLLYHFDWKLPAGIEPSDLDLTELVGVTAARKSDLYLVATPYQPPQK

SEQ ID NO: 224 - DNA, 1580 bp, Nicotiana tabacum
gaaatgggaaatgctcacaacagcaaaattgcagcaatctgtttgataattttcttggtatataaagcatgggaattgttgaagtggatatggattaagccaaagaaactggagagttgcctcagaaaacagggactcaaaggaaattcctacaggctattctatggagatatgaaagaattgtccaaaagtctcaaggaaatcaattcaaagcccatcatcaatctatcaaatgaagtagccccaagaatcattccttattatcttgaaatcatccaaaaatatggtaaaagatgttttgtttggcaaggaccaacccccgcaatattaataacagagccagaattaataaaggagatatttggtaagaactatgtttttcagaagcctaataatcccaacccactgaccaagttattggctcgaggtgttgtaagctacgaggaagaaaaatgggcaaaacacagaaagatcttaaaccctgcctttcatatggagaagttgaagcatatgctaccagcattttacttgagctgtagtgagatgctgaacaaatgggaggagattatcccagtaaaagaatcaaatgagttggacatttggcctcatcttcaaagaatgacaagtgatgtgatttctcgtgctgcctttggtagtagctacgaagaaggaagaagaatatttgaacttcaagaagaacaagctgagtatctaacgaagacattcaattcagtttatatcccaggttccagattttttcccaataaaatgaacaaaagaatgaaagaatgtgaaaaggaagtacgagaaacaattacgtgtctaattgacaacagattaaaggcaaaagaagaaggcaatggcaaggccctcaatgatgacctactgggtatattattagagtcaaattctatagaaattgaagaacatggtaacaagaagtttggaatgagtatacctgaagtaattgaagagtgcaaattattctattttgctggccaagagactacatcagtattgcttgtgtggacactgattttgttagggagaaatccagaatggcaggaacgtgctagagaggaagtttttcaagcctttggaagtgataaaccaacttttgacgaattatatcgcttgaaaattgtgacgatgattttgtacgagtctttaaggttatatccaccaatagcaactcgtactcgaaggactaatgaagaaacaaaattaggggaactagatttaccaaagggtgcactgctctttataccaacaatcttattacatcttgacaaggaaatttggggtgaagatgcagatgagttcaatccggagagatttagcgaaggggtggcaaaggcaacaaaggggaaaatgacatattttccatttggtgcaggaccgcgaaaatgcattgggcaaaacttcgcgattttggaagcaaaaatggctatagctatgattctacaacgcttctccttcgagctctctccatcttatacacactctccatacactgtggtcactttgaaacccaaatatggtgctcccctaataatgcacaggctgtagtcctgtgagaa

SEQ ID NO: 225 - protein, 521 aa, Nicotiana tabacum
MGNAHNSKIAAICLIIFLVYKAWELLKWIWIKPKKLESCLRKQGLKGNSYRLFYGDMKELSKSLKEINSKPIINLSNEVAPRIIPYYLEIIQKYGKRCFVWQGPTPAILITEPELIKEIFGKNYVFQKPNNPNPLTKLLARGVVSYEEEKWAKHRKILNPAFHMEKLKHMLPAFYLSCSEMLNKWEEIIPVKESNELDIWPHLQRMTSDVISRAAFGSSYEEGRRIFELQEEQAEYLTKTFNSVYIPGSRFFPNKMNKRMKECEKEVRETITCLIDNRLKAKEEGNGKALNDDLLGILLESNSIEIEEHGNKKFGMSIPEVIEECKLFYFAGQETTSVLLVWTLILLGRNPEWQERAREEVFQAFGSDKPTFDELYRLKIVTMILYESLRLYPPIATRTRRTNEETKLGELDLPKGALLFIPTILLHLDKEIWGEDADEFNPERFSEGVAKATKGKMTYFPFGAGPRKCIGQNFAILEAKMAIAMILQRFSFELSPSYTHSPYTVVTLKPKYGAPLIMHRL

SEQ ID NO: 226 - DNA, 1587 bp, Nicotiana tabacum
atgctttctcccatagaagcctttgtaggactagtaaccttcacatttctcttatacttcctatggacaaaaaaatctcaaaaacttccaaaacccttaccaccgaaaatccccggaggatggccggtaatcggccatctttttcacttcaataacgacggcgacgaccgtccattagctcgaaagctcggagacttagctgataaatacggccccgttttcacttttcggctaggtcttccccttgtgctagttgtaagcagttacgaagctataaaagattgcttctctacaaatgatgccattttctccaatcgtccagctcttctttacggcgaataccttggctacaataatacaatgctttttctagcaaattacggaccttactggcgaaaaaatcgtaaattagtcattcaggaagttctctctgctagtcgtctcgaaaaattcaaacaagtgagattcaccagaattcaaacgagcattaagaatttatacactcgaattaatggaaattcgagtacgataaatctaactgattggttagaagaattgaattttggtctgatcgtgaaaatgatcgctgggaaaaattatgaatccggtaaaggagatgaacaagtggaaagatttaagaatgcgtttaaggattttatggttttatcaatggaatttgtattatgggatgcatttccaattccattatttaaatgggtggattttcaaggtcatattaaggcaatgaaaaggacatttaaggatatagattctgtttttcagaactggttagaggaacatattaataaaagagaaaaaatagaggttggtgcagaagggaatgaacaagatttcattgatgtggtgctttcaaaattgagtaaagaatatcttgatgaaggttactctcgtgatactgtcattaaagcaacagtttttagtttggtcttggatgcagcagacacagttgctcttcacataaattggggaatgacattattgataaacaatcaaaatgccttgatgaaagcacaagaagagatagacacaaaagttggtaaggatagatgggtagaagagagtgatattaaggatttagtatacctccaagctattgttaaaaaggtgttacgattatatccaccaggacctttgttagtaccacatgaaaatgtaaaggattgtgttgttagtggatatcacattcctaaagggactagattattcgcaaacgtcatgaaactgcagcgcgatcctaaactcttgtcaaatcctgataagttcgatccagagagattcatcgctggtgatattgacttccgtggtcaccactatgagtttatcccatttggttctggaagacgatcttgtccggggatgacttatgcattgcaagtggaacacctaacaatggcacatttaatccagggtttcaattacaaaactccaaatgacgaggccttggatatgaaggaaggtgcaggcataacaatacgtaaggtaaatccagtggaattgataataacgcctcgcttggcacctgagctttactaaaacctaagatgtttcatcttggttgatcattgt

SEQ ID NO: 227 - protein, 517 aa, Nicotiana tabacum
MLSPIEAFVGLVTFTFLLYFLWTKKSQKLPKPLPPKIPGGWPVIGHLFHFNNDGDDRPLARKLGDLADKYGPVFTFRLGLPLVLVVSSYEAIKDCFSTNDAIFSNRPALLYGEYLGYNNTMLFLANYGPYWRKNRKLVIQEVLSASRLEKFKQVRFTRIQTSIKNLYTRINGNSSTINLTDWLEELNFGLIVKMIAGKNYESGKGDEQVERFKNAFKDFMVLSMEFVLWDAFPIPLFKWVDFQGHIKAMKRTFKDIDSVFQNWLEEHINKREKIEVGAEGNEQDFIDVVLSKLSKEYLDEGYSRDTVIKATVFSLVLDAADTVALHINWGMTLLINNQNALMKAQEEIDTKVGKDRWVEESDIKDLVYLQAIVKKVLRLYPPGPLLVPHENVKDCVVSGYHIPKGTRLFANVMKLQRDPKLLSNPDKFDPERFIAGDIDFRGHHYEFIPFGSGRRSCPGMTYALQVEHLTMAHLIQGFNYKTPNDEALDMKEGAGITIRKVNPVELIITPRLAPELY

SEQ ID NO: 228 - DNA, 1634 bp, Nicotiana tabacum
gggagaaggccttcaatatggagataccatattacagcttaaaaattgcaatttcttcatttgcaattatctttgtactaagatgggcatggaaaatcttgaattatgtgtggttaaaaccaaaagaattggagaaatacctcagacagcagggtttcaaaggaaactcttacaaattcttgtttggggatatgaaagagacgaagaaaatgggtgaagaagctatgtctaagccaatcaatttctctcatgacatgatttggcctagagttatgccattcatccacaaaaccatcaccaattatggtaagaattgtattgtgtggtttgggccaagaccagcagtcctgatcacagacccggaacttgtaaaggaggtgctaacgaagaatttcgtctatcagaagccgcttggcaatccactcacaaagttggcagcaactggaattgcaggctatgaaacagataaatgggctacacatagaaggcttctcaatcctgcttttcaccttgacaagttgaagcatatgctacctgcattccaatttactgctagtgagatgttgagcaaattggagaaagttgtttcaccaaacggaacagagatagatgtgtggccatatttacaaactttgacaagtgatgccatttcaagaactgcgtttggaagtagttatgaagaaggaagaaagatttttgaccttcaaaaagaacaactttcactaattctagaagtttcacgcacaatatatattccaggatggaggtttttgccaacgaaaaggaacaaaaggatgaagcaaatatttaatgaagtacgagcactggtatttggaattattaagaaaaggatgagtatgattgaaaatggagaagcacctgatgatttattgggaatattattggcatccaatttaaaagaaatccaacaacatggaaacaacaagaaatttggtatgagtattgatgaggtgattgaagagtgtaaactcttctattttgctgggcaagagactacttcatctttacttgtatggactatgattttgttgtgcaaatatcctaattggcaagataaagctagagaagaggttttgcaagtgtttgggagtagggaagttgactatgacaagttgaatcagctaaaaatagtaactatgatcttaaacgaggtcttaaggttgtatccagcaggatatgtgattaatcgaatggtaaacaaagaaacaaagttagggaatttgtgtttaccagccggcgtacagctcgtgttaccaacaatgttgttgcaacatgatactgaaatatggggagatgatgcaatggagttcaatccagagagatttagtgatggaatatccaaagcaacaaaaggaaaacttgtgttttttccatttagttggggtccaagaatatgtattgggcaaaattttgctatgttagaggctaaaatggcaatggctatgattctgaaaacctatgcatttgaactctctccatcttatgctcatgctcctcatccactactacttcaacctcaatatggtgctcaattaattttgtacaagttgtagatatggtcaatctggaacttgttatggaacttttatcatcgtaatcaaccatattgaggg

SEQ ID NO: 229 - protein, 518 aa, Nicotiana tabacum
MEIPYYSLKIAISSFAIIFVLRWAWKILNYVWLKPKELEKYLRQQGFKGNSYKFLFGDMKETKKMGEEAMSKPINFSHDMIWPRVMPFIHKTITNYGKNCIVWFGPRPAVLITDPELVKEVLTKNFVYQKPLGNPLTKLAATGIAGYETDKWATHRRLLNPAFHLDKLKHMLPAFQFTASEMLSKLEKVVSPNGTEIDVWPYLQTLTSDAISRTAFGSSYEEGRKIFDLQKEQLSLILEVSRTIYIPGWRFLPTKRNKRMKQIFNEVRALVFGIIKKRMSMIENGEAPDDLLGILLASNLKEIQQHGNNKKFGMSIDEVIEECKLFYFAGQETTSSLLVWTMILLCKYPNWQDKAREEVLQVFGSREVDYDKLNQLKIVTMILNEVLRLYPAGYVINRMVNKETKLGNLCLPAGVQLVLPTMLLQHDTEIWGDDAMEFNPERFSDGISKATKGKLVFFPFSWGPRICIGQNFAMLEAKMAMAMILKTYAFELSPSYAHAPHPLLLQPQYGAQLILYKL

SEQ ID NO: 230 - DNA, 1593 bp, Nicotiana tabacum
atggtttttcccatagaagcctttgtaggactagtaaccttcacatttctcttatacttcctatggacaaaaaaatctcaaaaacttccaaaacccttaccaccgaaaatccccggaggatggccggtaatcggccacctttttcacttcaataacgacggcgacgaccgtccattagctcgaaaactcggagacttagctgataaatacggccccgttttcacttttcggctaggtcttccccttgtgctagttgtaagcagttacgaagctacaaaagattgcttctctacaaatgacgccattttctccaatcgtccagcttttctttacggcgaataccttggctacaataatacaatgctttttctagcaaattacggaccttactggcgaaaaaatcgtaaattagtcattcaggaagttctctctgctagtcgtctcgaaaaattcaaacaagtgagattcaccagaattcaaacgagcattaagaatttatacactcgaattaatggaaattcgagtacgataaatctaactgattggttagaagaattgaattttggtctgatcgtgaaaatgatcgctgggaaaaattatgaatccggtaaaggagatgaacaagtggaaagatttaagaatgcgtttaaggattttatggttttatcaatggaatttgtattatgggatgcatttccaattccattatttaaatgggtggattttcaaggtcatattaagacaatgaaaaggacatttaaggatatagattctgtttttcagaactggttagaggaacatattaataaaagagaaaaaatggaggttggtgcagaagggaatgaacaagatttcattgatgtggtgctttcaaaattgagtaaagaatatcttgatgaaggttactctcgtgatactgtcattaaagcaacagtttttagtttggtcttggatgcagcagacacagttgctcttcacataaattggggaatgacattattgataaacaatcaaaatgccttgatgaaagcacaagaagagatagacacaaaagttggtaaggatagatgggtagaagagagtgatattaaggatttagtatacctccaagctattgttaaaaaggtgttacgattatatccaccaggacctttgttagtaccacatgaaaatgtaaaggattgtgttgttagtggatatcacattcctaaagggactagattattcgcaaacgtcatgaaactgcagcgcgatcctaaactcttgtcaaatcctgataagttcgatccagagagattcatcgctggtgatattgacttccgtggtcaccactatgagtttatcccatctggttctggaagacgatcttgtccggggatgacttatgcattgcaagtggaacacctaacaatggcacatttaatccagggtttcaattacaaaactccaaatgacgaggtcttggatatgaaggaaggtgcaggcataacaatacgtaaggtaaatccagtggaattgataataacgcctcgcttggcacctgagctttactaaaacctaagatctttcatcttggttgatcattgtttaata

SEQ ID NO: 231 - protein, 517 aa, Nicotiana tabacum
MVFPIEAFVGLVTFTFLLYFLWTKKSQKLPKPLPPKIPGGWPVIGHLFHFNNDGDDRPLARKLGDLADKYGPVFTFRLGLPLVLVVSSYEATKDCFSTNDAIFSNRPAFLYGEYLGYNNTMLFLANYGPYWRKNRKLVIQEVLSASRLEKFKQVRFTRIQTSIKNLYTRINGNSSTINLTDWLEELNFGLIVKMIAGKNYESGKGDEQVERFKNAFKDFMVLSMEFVLWDAFPIPLFKWVDFQGHIKTMKRTFKDIDSVFQNWLEEHINKREKMEVGAEGNEQDFIDVVLSKLSKEYLDEGYSRDTVIKATVFSLVLDAADTVALHINWGMTLLINNQNALMKAQEEIDTKVGKDRWVEESDIKDLVYLQAIVKKVLRLYPPGPLLVPHENVKDCVVSGYHIPKGTRLFANVMKLQRDPKLLSNPDKFDPERFIAGDIDFRGHHYEFIPSGSGRRSCPGMTYALQVEHLTMAHLIQGFNYKTPNDEVLDMKEGAGITIRKVNPVELIITPRLAPELY

SEQ ID NO: 232 - DNA, 1580 bp, Nicotiana tabacum
atgctttctcccatagaagccattgtaggactagtaaccttcacatttctcttcttcttcctatggacaaaaaaatctcaaaaaccttcaaaacccttaccaccgaaaatccccggaggatggccggtaatcggccatcttttccacttcaatgacgacggcgacgaccgtccattagctcgaaaactcggagacttagctgacaaatacggccccgttttcacttttcggctaggccttccccttgtcttagttgtaagcagttacgaagctgtaaaagactgtttctccacaaatgacgccattttttccaatcgtccagcttttctttacggcgattaccttggctacaataatgccatgctatttttggccaattacggaccttactggcgaaaaaatcgaaaattagttattcaggaagttctctccgctagtcgtctcgaaaaattcaaacacgtgagatttgcaagaattcaagcgagcatgaagaatttatatactcgaattgatggaaattcgagtacgataaatttaactgattggttagaagaattgaattttggtctgatcgtgaagatgatcgctggaaaaaattatgaatccggtaaaggagatgaacaagtggagagatttaagaaagcgtttaaggattttatgattttatcaatggagtttgtgttatgggatgcatttccaattccattatttaaatgggtggattttcaagggcatgttaaggctatgaaaaggacttttaaagatatagattctgtttttcagaattggttagaggaacatattaataaaagagaaaaaatggaggttaatgcagaagggaatgaacaagatttcattgatgtggtgctttcaaaaatgagtaatgaatatcttggtgaaggttactctcgtgatactgtcattgaagcaacggtgtttagtttggtcttggatgcagcagacacagttgctcttcacataaattggggaatggcattattgataaacaatcaaaaggccttgacgaaagcacaagaagagatagacacaaaagtttgtaaggacagatgggtagaagagagtgatattaaggatttggtatacctccaagctattgttaaagaagtgttacgattatatccaccaggacctttgttagtaccacacgaaaatgtagaagattgtgttgttagtggatatcacattcctaaagggacaagattattcgcaaacgtcatgaaactgcaacgtgatcctaaactctggtctgatcctgatactttcgatccagagagattcattgctactgatattgactttcgtggtcagtactataagtatatcccgtttggtcctggaagacgatcttgtccagggatgacttatgcattgcaagtggaacacttaacaatggcacatttgatccaaggtttcaattacagaactccaaatgacgagcccttggatatgaaggaaggtgcaggcataactatacgtaaggtaaatcctgtggaactgataatagcgcctcgcctggcacctgagctttattaaaacctaagatgtttcatcttggttga

SEQ ID NO: 233 - protein, 517 aa, Nicotiana tabacum
MLSPIEAIVGLVTFTFLFFFLWTKKSQKPSKPLPPKIPGGWPVIGHLFHFNDDGDDRPLARKLGDLADKYGPVFTFRLGLPLVLVVSSYEAVKDCFSTNDAIFSNRPAFLYGDYLGYNNAMLFLANYGPYWRKNRKLVIQEVLSASRLEKFKHVRFARIQASMKNLYTRIDGNSSTINLTDWLEELNFGLIVKMIAGKNYESGKGDEQVERFKKAFKDFMILSMEFVLWDAFPIPLFKWVDFQGHVKAMKRTFKDIDSVFQNWLEEHINKREKMEVNAEGNEQDFIDVVLSKMSNEYLGEGYSRDTVIEATVFSLVLDAADTVALHINWGMALLINNQKALTKAQEEIDTKVCKDRWVEESDIKDLVYLQAIVKEVLRLYPPGPLLVPHENVEDCVVSGYHIPKGTRLFANVMKLQRDPKLWSDPDTFDPERFIATDIDFRGQYYKYIPFGPGRRSCPGMTYALQVEHLTMAHLIQGFNYRTPNDEPLDMKEGAGITIRKVNPVELIIAPRLAPELY

SEQ ID NO: 234 - DNA, 1639 bp, Nicotiana tabacum
tttcatatacctttagtactcttgaaattttcaaataatggtttatcttctttctcccatagaagccattgtaggatttgtaaccttttcatttctattctactttctatggaccaaaaaacaatcaaaaatcttaaacccactacctccaaaaatcccaggtggatggccagtaatcggccatctcttttatttcaagaacaatggcgatgaagatcgccatttttctcaaaaactcggtgacttagctgacaaatatggtcccgtcttcactttccggttagggtttcgccgtttcttggcggtgagtagttatgaagctatgaaagaatgcttcactaccaatgatatccatttcgccgatcggccatctttactctacggagaatacctttgctataataacgccatgcttgctgttgccaaatatggcccttactggaaaaaaaatcgaaagttagtcaatcaagaagttctctccgttagtcggctcgaaaaattcaaacatgttagattttctataattcagaaaaatattaaacaattgtataattgtgattcaccaatggtgaagataaaccttagtgattggatagataaattgacattcgacatcattttgaaaatggttgttgggaagaactataataatggacatggagaaatactcaaagttgcttttcagaaattcatggttcaagctatggagatggagctctatgatgtttttcacattccatttttcaagtggttggatcttacagggaatattaaggctatgaaacaaactttcaaagacattgataatattatccaaggttggttagatgagcacattaagaagagagaaacaaaggatgttggaggtgaaaacgaacaagattttatagatgtggtgctttccaagatgagcgacgaacatcttggcgagggttactctcatgacacaaccatcaaagcaactgtattcactttggtcttggatgcaacagacacacttgcacttcatataaagtgggtaatggcgttaatgataaacaataagcatgtcatgaagaaagcacaagaagagatggacacaattgttggtagagatagatgggtagaagagagtgatatcaagaatttggtgtatctccaagcaattgtcaaagaagtattacgattacatccacccgcacctttgtcagtgcaacacctatctgtagaagattgtgttgtcaatgggtaccatattcctaaggggactgcactacttaccaatattatgaaactacagcgagatcctcaaacatggccaaatcctgataaattcgatccagagagattcctgacgactcatgctactattgactaccgcgggcagcactatgagtcgatcccctttggtacggggagacgagcttgtcccgcgatgaattattcattgcaagtggaacacctttcaattgctcatatgatccaaggtttcagttttgcaactacgaccaatgagcctttggatatgaaacaaggtgtgggtttaactttaccaaagaagactgatgttgaagtgctaattacacctcgccttcctcctacgctttatcaatattaagatgttttgttgtcgggattcgttctgatcaatccctcaatg

SEQ ID NO: 235 - protein, 519 aa, Nicotiana tabacum
MVYLLSPIEAIVGFVTFSFLFYFLWTKKQSKILNPLPPKIPGGWPVIGHLFYFKNNGDEDRHFSQKLGDLADKYGPVFTFRLGFRRFLAVSSYEAMKECFTTNDIHFADRPSLLYGEYLCYNNAMLAVAKYGPYWKKNRKLVNQEVLSVSRLEKFKHVRFSIIQKNIKQLYNCDSPMVKINLSDWIDKLTFDIILKMVVGKNYNNGHGEILKVAFQKFMVQAMEMELYDVFHIPFFKWLDLTGNIKAMKQTFKDIDNIIQGWLDEHIKKRETKDVGGENEQDFIDVVLSKMSDEHLGEGYSHDTTIKATVFTLVLDATDTLALHIKWVMALMINNKHVMKKAQEEMDTIVGRDRWVEESDIKNLVYLQAIVKEVLRLHPPAPLSVQHLSVEDCVVNGYHIPKGTALLTNIMKLQRDPQTWPNPDKFDPERFLTTHATIDYRGQHYESIPFGTGRRACPAMNYSLQVEHLSIAHMIQGFSFATTTNEPLDMKQGVGLTLPKKTDVEVLITPRLPPTLYQY

SEQ ID NO: 236 - DNA, 1610 bp, Nicotiana tabacum
ctttttctccccaaaaaagagctcatttcccttgtccccaaaaatggatcttctcttactagagaagaccttaattggtctcttctttgccattttaatcgctataattgtctctagacttcgttcaaagcgttttaagcttcccccaggaccaatcccagtaccagtttttggtaattggcttcaagttggtgatgatttaaaccacagaaatcttactgattttgccaaaaaatttggtgatcttttcttgttaagaatgggccagcgtaatttagttgttgtgtcatctcctgaattagctaaagaagttttacacacacaaggtgttgaatttggttcaagaacaagaaatgttgtatttgatatttttactggaaaaggtcaagatatggtttttactgtatatggtgaacactggagaaaaatgaggagaattatgactgtaccattttttactaataaagttgtgcagcaatatagaggggggtgggagtttgaagtggcaagtgtaattgaggatgtgaagaaaaatcctgaatctgctactaatgggattgtattaaggaggagattacaattgatgatgtataataatatgtttaggattatgtttgataggagatttgagagtgaagatgatcctttgtttgttaagcttaaggctttgaatggtgaaaggagtagattggctcagagttttgagtataattatggtgattttattcccattttgaggccttttttgagaggttatttgaagatctgtaaagaagttaaggagaagaggctgcagcttttcaaagattactttgttgatgaaagaaagaagctttcaaataccaagagcttggacagcaatgctctgaaatgtgcgattgatcacattcttgaggctcaacagaagggggagatcaatgaggacaacgttctttacattgttgaaaacatcaatgttgctgctatagaaaccacattatggtcaattgagtggggtatcgccgagttagtcaaccaccctcacatccaaaagaaactccgcgacgagattgacacagttcttggcccaggagtgcaagtgactgaaccagacacccacaagcttccataccttcaggctgtgatcaaggagacgcttcgtctccgtatggcaattcctctattagtcccacacatgaaccttcacgatgcaaagcttggcgggtttgatattccagcagagagcaaaatcttggttaacgcttggtggctagctaacaacccggctcattggaagaaacccgaagagttcagacccgagaggttcttcgaagaggagaagcacgttgaggccaatggcaatgacttcagatatcttccgtttggcgttggtaggaggagttgccctggaattatacttgcattgccaattcttggcattactttgggacgtttggttcagaactttgagctgttgcctcctccaggccagtcgaagctcgacaccacagagaaaggtggacagttcagtctccatattttgaagcattccaccattgtgttgaaaccaaggtcttgctgaactttctgatcctaatcaattaaggggttgaagaaattttataattatg

SEQ ID NO: 237 - protein, 505 aa, Nicotiana tabacum
MDLLLLEKTLIGLFFAILIAIIVSRLRSKRFKLPPGPIPVPVFGNWLQVGDDLNHRNLTDFAKKFGDLFLLRMGQRNLVVVSSPELAKEVLHTQGVEFGSRTRNVVFDIFTGKGQDMVFTVYGEHWRKMRRIMTVPFFTNKVVQQYRGGWEFEVASVIEDVKKNPESATNGIVLRRRLQLMMYNNMFRIMFDRRFESEDDPLFVKLKALNGERSRLAQSFEYNYGDFIPILRPFLRGYLKICKEVKEKRLQLFKDYFVDERKKLSNTKSLDSNALKCAIDHILEAQQKGEINEDNVLYIVENINVAAIETTLWSIEWGIAELVNHPHIQKKLRDEIDTVLGPGVQVTEPDTHKLPYLQAVIKETLRLRMAIPLLVPHMNLHDAKLGGFDIPAESKILVNAWWLANNPAHWKKPEEFRPERFFEEEKHVEANGNDFRYLPFGVGRRSCPGIILALPILGITLGRLVQNFELLPPPGQSKLDTTEKGGQFSLHILKHSTIVLKPRSC

SEQ ID NO: 238 - DNA, 1595 bp, Nicotiana tabacum
aacaataaaaatggagacattatttaacatcaaagttgcagtttcattagtaattgtgataatttttctgagatgggtatggaaattcttgaattgggtgtggattcaaccaaagaaaatggaaaaaagactaaaaatggaaggtttcaaaggaagctcatataagctattatttggagatatgaaagaaataaatacaatggttgaagaagccaaaaccaagcctatgaattttaccaatgattatgtggctagagtcttgcctcacttcacaaagttgatgctccaatatggcaagaatagctttatgtggttagggccaaaaccaacaatgtttatcacagaccctgaactaataagggagatcttgtcaaaaagttacatataccaggagattcaaggcaatccaatcactaagttgctagcacaaggactagtaagttatgaagcagagaaatgggctaagcatagaaaaattatcaatcctgcatttcaccttgacaagttgaagcatatgctaccatcattctacttgagttgttgtgacatgctcagaaaatgggaaagtatagcttcatcagagggatcagaaatagacgtgtggccttttctggaaacgttgacaagcgatgctatttcaagaacagcttttggtagtaactatgaagacgggagacagatatttgagcttcaaaaagaacaagctgagttgattttacaagcagcgcgatggctttacatccccggatggaggtttgtgccaacaaagaggaacaagaggatgaagcaaatcgctaaagaagtacgatcattagtgttgggaataatcaataagagaataagggaaatgaaagcaggggaagctgcaaaagatgacttactgggaatactattggaatctaatttcaaagaaatccaaatgcacggaaacaagaactttggcatgactatcgacgaagtgattgaagagtgcaagttattttactttgctgggcaagaaactacttcagttttgcttgtttggactttgattttactgagtaagcatgtcgattggcaagaaagagctagagaagaagttcatcaagtctttggaagtaacaaacctgattatgacgcattgaatcagttgaaagttgtaacgatgatattcaacgaggttttaaggttgtacccaccgggaattaccataagtcgaactgtacacgaggataccaaattagggaacttgtcattgccagcagggatacagcttgtgttacctgcaatttggttgcatcatgacaatgaaatatggggagatgatgcaaaggagttcaaaccagagaggtttagtgaaggagttaataaagcaacaaagggtaaatttgcatattttccatttagttggggaccaagaatatgtgttggactgaattttgcaatgttagaggcaaaaatggcacttgcattgattctacaacactatgcttttgagctctctccatcttatgcacatgctcctcatacaattatcactctgcaacctcaacatggtgctcctttgattttgcgcaagctgtagcgcggatatattgattggttatctactgtag

SEQ ID NO: 239 - protein, 517 aa, Nicotiana tabacum
METLFNIKVAVSLVIVIIFLRWVWKFLNWVWIQPKKMEKRLKMEGFKGSSYKLLFGDMKEINTMVEEAKTKPMNFTNDYVARVLPHFTKLMLQYGKNSFMWLGPKPTMFITDPELIREILSKSYIYQEIQGNPITKLLAQGLVSYEAEKWAKHRKIINPAFHLDKLKHMLPSFYLSCCDMLRKWESIASSEGSEIDVWPFLETLTSDAISRTAFGSNYEDGRQIFELQKEQAELILQAARWLYIPGWRFVPTKRNKRMKQIAKEVRSLVLGIINKRIREMKAGEAAKDDLLGILLESNFKEIQMHGNKNFGMTIDEVIEECKLFYFAGQETTSVLLVWTLILLSKHVDWQERAREEVHQVFGSNKPDYDALNQLKVVTMIFNEVLRLYPPGITISRTVHEDTKLGNLSLPAGIQLVLPAIWLHHDNEIWGDDAKEFKPERFSEGVNKATKGKFAYFPFSWGPRICVGLNFAMLEAKMALALILQHYAFELSPSYAHAPHTIITLQPQHGAPLILRKL

SEQ ID NO: 240 - DNA, 1673 bp, Nicotiana tabacum; identical to SEQ ID NO: 220

SEQ ID NO: 241 - protein, 514 aa, Nicotiana tabacum; identical to SEQ ID NO: 221

SEQ ID NO: 242 - DNA, 1601 bp, Nicotiana tabacum
gaattatttcacgtgttgtattccttgtctatgataggaagctcgttacctcagcgtacaaaccccaaataaaaaatgaatttccttgtggtgttagcttctctctttctctttgtgttcctaatgaggataagcaaagcaaaaaagctccctccaggtccaaggaaactgcctataataggaaaccttcatcaaattggaaaattacctcatcgttcacttcaaaaactttctaatgaatatggggatttcattttcttgcaattaggttctgtaccgactgtggttgtctcctcagctgacattgcccgagagatctttagaactcacgaccttgttttctcaggccgtcctgctttatatgctgccagaaaactttcctacaattgctacaacgtttcatttgcaccctatggtaattactggagagaggctcggaaaattctagtgttggagttgctaagtacaaagagagtacaaagtttcgaggcaattcgagacgaggaagtaagtagcttggttcaaattatctgtagttccttgagctcacctgttaacataagcacattagcactatccttggcaaataacgttgtttgtcgagtggcttttgggaaagggagtgctgaaggaggaaatgattatgaggataggaagtttaatgaaattctatatgagacacaagaattattgggtgagtttaacgttgctgattattttcctcggatggcatggattaacaaaataaatgggtttgatgaacgattggaaaataattttagggaattggataagttttatgacaaagtaatagaagatcatcttaattcatgtagctggatgaaacaaagggatgatgaagacgttattgatgtattgcttcgaattcaaaaggatccaagccaagaaattcctctcaaagatgatcacattaagggccttcttgcggatatattcatagctggaactgatacatcatcaacaaccatagaatgggcaatgtcagaactcataaaaaatccaagagtcttgagaaaagctcaagaggaagttagagaagtttctaagggaaaacaaaaggtccaagaaagtgatctttgcaaactagattacttgaaattggtcatcaaagaaacctttagactacacccaccagtcccattactagtccctcgagtaacaacagccagctgcaaaataatggaatacgaaattccagtaaatacaagagtcttcatcaacgcgacagcaaatgggacaaatccaaaatactgggaaaatccattgacattcttgccagagagattcttggataaggagattgattacagaggcaaaaattttgagttgttgccatttggggcagggagaagagggtgtccaggaattaatttttcaataccacttgttgagcttgcacttgctaatctattgtttcattataattggtcacttcctgaagggatgctagctaaggatgttgatatggaagaagctttggggattaccatgcacaagaaatctcccctttgcttagtagcttctcattatacttgttgagattttaaaagattttagcatagctatatatagcttgaagt

SEQ ID NO: 243 - protein, 494 aa, Nicotiana tabacum
MNFLVVLASLFLFVFLMRISKAKKLPPGPRKLPIIGNLHQIGKLPHRSLQKLSNEYGDFIFLQLGSVPTVVVSSADIAREIFRTHDLVFSGRPALYAARKLSYNCYNVSFAPYGNYWREARKILVLELLSTKRVQSFEAIRDEEVSSLVQIICSSLSSPVNISTLALSLANNVVCRVAFGKGSAEGGNDYEDRKFNEILYETQELLGEFNVADYFPRMAWINKINGFDERLENNFRELDKFYDKVIEDHLNSCSWMKQRDDEDVIDVLLRIQKDPSQEIPLKDDHIKGLLADIFIAGTDTSSTTIEWAMSELIKNPRVLRKAQEEVREVSKGKQKVQESDLCKLDYLKLVIKETFRLHPPVPLLVPRVTTASCKIMEYEIPVNTRVFINATANGTNPKYWENPLTFLPERFLDKEIDYRGKNFELLPFGAGRRGCPGINFSIPLVELALANLLFHYNWSLPEGMLAKDVDMEEALGITMHKKSPLCLVASHYTC

SEQ ID NO: 244 - DNA, 1570 bp, Nicotiana tabacum
caaagactaaaagatgtcggtctttgcggttatttcattctttctacttctgttttttcttttcaaatcatatttgccctcatcgaaaacaaagaaaaattctccaccatctccttcaaagcttccgttaatcggtcacttccacaaactaggcttacaacctcaccgttctctacaaaaactatcaaatgaacatggtcccatgatgatgcttcaattcggtagcgtacctgtgcttatcgcttcatcagctgaagctgcttccgaaatcatgaaaacccaagatttgtcttttgcaaacaaacccatttcaaccattcctagcaagcttttcttcggcccaaaggacgttgccttcaccccatatggggattactggaggaatgccagaagcatttgcatgcttcagcttttgaacaacaaaagagtccagtcttttcgaaagataagggaagaagagacttctcttcttctccagaggattagggaatcgccaaattcagaagtcgatttaacggagctgttcgtttccatgactaacgacatagtttgcagggtggccttaggaaggaagtattgtgatggggaagaagggaggaaattcaagtctttgctgttagagtttgtggaattgttgggagtttttaacattggagattacatgccgtggcttgcatggatgaatcgtttcaatggtttgaatgccaaagtggataaagtggcgaaagagtttgatgcatttttggaggatgtgattgaggaacacggaggaaataagaaatcagacactgaagctgaaggggcagacttcgtggatatattattgcaggttcacaaagaaaacaaggctggttttcaagtcgaaatggatgcaatcaaagctattatcatggatatgtttgctgcgggaacagatacaacttccacgcttctagagtggacaatgaacgagctcttaagaaatccaaaaacattgaataagttgagagatgaggtgagacaagtgactcaagggaagacagaggtaacagaggatgacttagagaaaatgccgtatttaagagcagcagttaaggagagttccaggctacactctccagtgccacttctacctcgagaagcaattaaggatgcaaaggttttgggctacgatatagctgcagggactcaagtcctcgtttgtccatgggcaatctcaagagatccaaacctttgggaaaatccagaggagtttcaacctgaaagattcttggatacttccatagattacaaaggcttacatttcgagttaattccattcggtgcaggtcggaggggttgccctggcatcacatttgctaagtttgtgaatgagctagcattggcaagattaatgttccattttgatttctcgctaccaaaaggagttaagcatgaggatttggacgtggaggaagctgctggaattactgttagaaggaagttcccccttttagccgtcgccactccatgctcgtgatttttattttagagctcattctatgccttaaaaactactactagataactgcgtagtaaataatgcttggta

SEQ ID NO: 245 - protein, 494 aa, Nicotiana tabacum
MSVFAVISFFLLLFFLFKSYLPSSKTKKNSPPSPSKLPLIGHFHKLGLQPHRSLQKLSNEHGPMMMLQFGSVPVLIASSAEAASEIMKTQDLSFANKPISTIPSKLFFGPKDVAFTPYGDYWRNARSICMLQLLNNKRVQSFRKIREEETSLLLQRIRESPNSEVDLTELFVSMTNDIVCRVALGRKYCDGEEGRKFKSLLLEFVELLGVFNIGDYMPWLAWMNRFNGLNAKVDKVAKEFDAFLEDVIEEHGGNKKSDTEAEGADFVDILLQVHKENKAGFQVEMDAIKAIIMDMFAAGTDTTSTLLEWTMNELLRNPKTLNKLRDEVRQVTQGKTEVTEDDLEKMPYLRAAVKESSRLHSPVPLLPREAIKDAKVLGYDIAAGTQVLVCPWAISRDPNLWENPEEFQPERFLDTSIDYKGLHFELIPFGAGRRGCPGITFAKFVNELALARLMFHFDFSLPKGVKHEDLDVEEAAGITVRRKFPLLAVATPCS

SEQ ID NO: 246 - DNA, 1585 bp, Nicotiana tabacum
attatccatcacctaaaatggagaattcttgggtttttctagccttggcagggctatctgcattagcttttctctgtaaaataatcacctgtcgaagaccggttaaccggaaaataccaccaggtccaaaaccatggcccatcattggcaatttgaacctacttggtcctataccacatcaatcttttgacttgctttccaaaaaatatggagagttgatgctgctgaaatttggctccaggccagttcttgttgcttcatctgctgaaatggcaaaacagtttttaaaagtacatgatgctaatttcgcctcccgtcctatgctagctggtggaaagtatacaagctataactattgtgacatgacatgggcaccctatggtccctattggcgccaagcacgacgaatttaccttaaccagatatttactccgaaaaggctagactcgttcgagtacattcgtgttgaagaaaggcaggccttgatttcccagctgaattcccttgctggaaagccattttttctcaaagaccatttgtcgcgatttagcctctgcagcatgacaaggatggttttgagcaacaagtactttggtgaatcaacagttagagtagaagatttgcagtacctggtagatcaatggttcttacttaatggtgctttcaacattggagattggattccatggctcagcttcttggacctacaaggctatgtgaaacaaatgaaggctttgaaaagaacttttgataagttccacaacattgtgctagatgatcgcagggctaagaagaatgcagagaagaactttgtcccaaaagacatggttgatgtcttgttgaagatggctgaagatcctaatctggaagtcaaactcactaatgactgtgtcaaagggttaatgcaggatttactaactggaggaacagatagcttaacagcagcagtgcaatgggcatttcaagaacttcttagacggccaagggttattgagaaggcaaccgaagagcttgaccggattgtcgggaaagagagatgggtagaagagaaagattgctcgcagctatcttacgttgaagcaatcctcaaggaaacactaaggttacatcctctaggaactatgctagcaccgcattgtgctatagaagattgtaacgtggctggttatgacatacagaaaggaacgaccgttctggtgaatgtttggaccattggaagggacccaaaatactgggatagagcacaagagtttctccccgagagattcttagagaacgacattgatatggacggacataactttgctttcttgccatttggctcggggcgaaggaggtgccctggctatagccttggacttaaggttatccgagtaacattagccaacatgttgcatggattcaactggaaattacctgaaggtatgaagccagaagatataagtgtggaagaacattatgggctcactacacatcctaagtttcctgttcctgtgatcttggaatctagactttcttcagatctctattcccccatcacttaatcctaagtgcttcctattatagcatcatatcaatatccctc

SEQ ID NO: 247 - protein, 508 aa, Nicotiana tabacum
MENSWVFLALAGLSALAFLCKIITCRRPVNRKIPPGPKPWPIIGNLNLLGPIPHQSFDLLSKKYGELMLLKFGSRPVLVASSAEMAKQFLKVHDANFASRPMLAGGKYTSYNYCDMTWAPYGPYWRQARRIYLNQIFTPKRLDSFEYIRVEERQALISQLNSLAGKPFFLKDHLSRFSLCSMTRMVLSNKYFGESTVRVEDLQYLVDQWFLLNGAFNIGDWIPWLSFLDLQGYVKQMKALKRTFDKFHNIVLDDRRAKKNAEKNFVPKDMVDVLLKMAEDPNLEVKLTNDCVKGLMQDLLTGGTDSLTAAVQWAFQELLRRPRVIEKATEELDRIVGKERWVEEKDCSQLSYVEAILKETLRLHPLGTMLAPHCAIEDCNVAGYDIQKGTTVLVNVWTIGRDPKYWDRAQEFLPERFLENDIDMDGHNFAFLPFGSGRRRCPGYSLGLKVIRVTLANMLHGFNWKLPEGMKPEDISVEEHYGLTTHPKFPVPVILESRLSSDLYSPIT

SEQ ID NO: 248 - DNA, 1591 bp, Nicotiana tabacum
ctcattatccatcacctaaaatggagaattcttgggtttttctagccttggcagggctatctgcattagcttttctctgtaaaataatcacctgtcgaagaccggttaaccggaaaataccaccaggtccaaaaccatggcccatcattggcaatttgaacctacttggtcctataccacatcaatcttttgacttgctttccaaaaaatatggagagttgatgctgctgaaatttggctccaggccagttcttgttgcttcatctgctgaaatggcaaaacagtttttaaaagtacatgatgctaatttcgcctcccgtcctatgctagctggtggaaagtatacaagctataactattgtgacatgacatgggcaccctatggtccctattggcgccaagcacgacgacgaatttaccttaaccagatatttactccgaaaaggctagactcgttcgagtacattcgtgttgaagaaaggcaggccttgatttcccagctgaattcccttgctggaaagccattttttctcaaagaccatttgtcgcgatttagcctctgcagcatgacaaggatggttttgagcaacaagtattttggtgaatcaacagttagagtagaagatttgcagtacctggtagatcaatggttcttacttaatggtgctttcaacattggagattggattccatggctcagcttcttggacctacaaggctatgtgaaacaaatgaaggctttgaaaagaacttttgataagttccacaacattgtgctagatgatcacagggctaagaagaatgcagagaagaactttgtcccaaaagacatggttgatgtcttgttgaagatggctgaagatcctaatctggaagtcaaactcactaatgactgtgtcaaagggttaatgcaggatttactaactggaggaacagatagcttaacagcagcagtgcaatgggcatttcaagaacttcttagacagccaagggttattgagaaggcaaccgaagagcttgaccggattgtcgggaaagagagatgggtagaagagaaagattgctcgcagctatcttacgttgaagcaatcctcaaggaaacactaaggttacatcctctaggaactatgctagcaccgcattgtgctatagaagattgtaacgtggctggttatgacatacagaaaggaacgaccgttctggtgaatgtttggaccattggaagggacccaaaatactgggatagagcacaagagtttctccccgagagattcttagagaacgacattgatatggacggacataactttgctttcttgccatttggctcggggcgaaggaggtgccctggctatagccttggacttaaggttatccgagtaacattagccaacatgttgcatggattcaactggaaattacctgaaggtatgaagccagaagatataagtgtggaagaacattatgggctcactacacatcctaagtttcctgttcctgtgatcttggaatctagactttcttcagatctctattcccccatcacttaatcctaagtgcttcctattatagcatcatatcaatatccctc

SEQ ID NO: 249 - protein, 509 aa, Nicotiana tabacum
MENSWVFLALAGLSALAFLCKIITCRRPVNRKIPPGPKPWPIIGNLNLLGPIPHQSFDLLSKKYGELMLLKFGSRPVLVASSAEMAKQFLKVHDANFASRPMLAGGKYTSYNYCDMTWAPYGPYWRQARRRIYLNQIFTPKRLDSFEYIRVEERQALISQLNSLAGKPFFLKDHLSRFSLCSMTRMVLSNKYFGESTVRVEDLQYLVDQWFLLNGAFNIGDWIPWLSFLDLQGYVKQMKALKRTFDKFHNIVLDDHRAKKNAEKNFVPKDMVDVLLKMAEDPNLEVKLTNDCVKGLMQDLLTGGTDSLTAAVQWAFQELLRQPRVIEKATEELDRIVGKERWVEEKDCSQLSYVEAILKETLRLHPLGTMLAPHCAIEDCNVAGYDIQKGTTVLVNVWTIGRDPKYWDRAQEFLPERFLENDIDMDGHNFAFLPFGSGRRRCPGYSLGLKVIRVTLANMLHGFNWKLPEGMKPEDISVEEHYGLTTHPKFPVPVILESRLSSDLYSPIT

SEQ ID NO: 250 - DNA, 1615 bp, Nicotiana tabacum
tgataatgctctttctactctttgtagcccttcctttcattcttatttttcttcttcctaaattcaaaaatggtggaaataacagattgccaccaggtcctataggtttaccattcattggaaatttgcatcaatacgatagtataactcctcatatctatttttggaaactttcaaaaaaatatggcaaaatcttctcattaaaacttgcttctactaatgtggtagtagtttcttcagcaaaattagcaaaagaagtattgaaaaaacaagatttaatattttgtagtagaccatctattcttggccaacaaaaactgtcttattatggtcgtgatattgcttttaatgattattggagagaaatgagaaaaatttgtgttcttcatctttttagtttaaaaaaagttcaattatttagtccaattcgtgaagatgaagtttttagaatgattaagaaaatatcaaaacaagcttctacttcacaaattattaatttgagtaatttaatgatttcattaacaagtacaattatttgtagagttgcttttggtgttaggattgaagaagaagcacatgcaaggaagagatttgattttcttttggccgaggcacaagaaatgatggctagtttctttgtatctgatttttttccctttttaagttggattgataaattaagtggattgacatatagacttgagaggaatttcaaggatttggataatttttatgaagaactcattgagcaacatcaaaatcctaataagccaaaatatatggaaggagatattgttgatcttttgctacaattgaagaaagagaaattaacaccacttgatctcactatggaagatataaaaggaattctcatgaatgtgttagttgcaggatcagacactagtgcagctgctactgtttgggcaatgacagccttgataaagaatcctaaagccatggaaaaagttcaattagaaatcagaaaatcagttgggaagaaaggcattgtaaatgaagaagatgtccaaaacatcccttattttaaagcagtgataaaggaaatatttagattgtatccaccagctccacttttagttccaagagaatcaatggaaaaaaccatattagaaggttatgaaattcggccaagaaccatagttcatgttaacgcttgggctatagcaagggatcctgaaatatgggaaaatccagatgaatttatacctgagagatttttgaatagcagtatcgattacaagggtcaagattttgagttacttccatttggtgcaggcagaagaggttgcccaggtattgcacttggggttgcatccatggaacttgctttgtcaaatcttctttatgcatttgattgggagttgccttatggagtaaaaaaagaagacatcgacacaaacgttaggcctggaattgccatgcacaagaaaaacgaactttgccttgtcccaaaaaattatttataaattatattgggacgtggatctcatgctagttctgtgcggtcagctaagcttattatttttggctcaaattatgtatacataattagtacatgtttaaaatgtataaatatagtagaaccattctcatggtt

SEQ ID NO: 251 - protein, 492 aa, Nicotiana tabacum
MLFLLFVALPFILIFLLPKFKNGGNNRLPPGPIGLPFIGNLHQYDSITPHIYFWKLSKKYGKIFSLKLASTNVVVVSSAKLAKEVLKKQDLIFCSRPSILGQQKLSYYGRDIAFNDYWREMRKICVLHLFSLKKVQLFSPIREDEVFRMIKKISKQASTSQIINLSNLMISLTSTIICRVAFGVRIEEEAHARKRFDFLLAEAQEMMASFFVSDFFPFLSWIDKLSGLTYRLERNFKDLDNFYEELIEQHQNPNKPKYMEGDIVDLLLQLKKEKLTPLDLTMEDIKGILMNVLVAGSDTSAAATVWAMTALIKNPKAMEKVQLEIRKSVGKKGIVNEEDVQNIPYFKAVIKEIFRLYPPAPLLVPRESMEKTILEGYEIRPRTIVHVNAWAIARDPEIWENPDEFIPERFLNSSIDYKGQDFELLPFGAGRRGCPGIALGVASMELALSNLLYAFDWELPYGVKKEDIDTNVRPGIAMHKKNELCLVPKNYL

SEQ ID NO: 252 - DNA, 1624 bp, Nicotiana tabacum
tgataatgctctttctactctttgtagcccttcctttcattcttatttttcttcttcctaaattcaaaaatggtggaaataacagattgccaccaggtcctataggtttaccattcattggaaatttgcatcaatatgatagtataactcctcatatctatttttggaaactttccaaaaaatatggcaaaatcttctcattaaaacttgcttctactaatgtggtagtagtttcttcagcaaaattagcaaaagaagtattgaaaaaacaagatttaatattttgtagtagaccatctattcttggccaacaaaaactgtcttattatggtcgtgatattgcttttgcaccttataatgattattggagagaaatgagaaaaatttgtgttcttcatctttttagtttaaaaaaagttcaattatttagtccaattcgtgaagatgaagtttttagaatgattaagaaaatatcaaaacaagcttctacttcacaaattattaatttgagtaatttaatgatttcattaacaagtacaattatttgtagagttgcttttggtgttaggtttgaagaagaagcacatgcaaggaagagatttgattttcttttggccgaggcacaagaaatgatggctagtttctttgtatctgatttttttccctttttaagttggattgataaattaagtggattgacatatagacttgagaggaatttcaaggatttggataatttttatgaagaactcattgagcaacatcaaaatcctaataagccaaaatatatggaaggagatattgttgatcttttgctacaattgaagaaagagaaattaacaccacttgatctcactatggaagatataaaaggaattctcatgaatgtgttagttgcaggatcagacactagtgcagctgctactgtttgggcaatgacagccttgataaagaatcctaaagccatggaaaaagttcaattagaaatcagaaaatcagttgggaagaaaggcattgtaaatgaagaagatgtccaaaacatcccttattttaaagcagtgataaaggaaatatttagattgtatccaccagctccacttttagttccaagagaatcaatggaaaaaaccatattagaaggttatgaaattcggccaagaaccatagttcatgttaacgcttgggctatagcaagggatcctgaaatatgggaaaatccagatgaatttatacctgagagatttttgaatagcagtatcgattacaagggtcaagattttgagttacttccatttggtgcaggcagaagaggttgcccaggtattgcacttggggttgcatccatggaacttgctttgtcaaatcttctttatgcatttgattgggagttgccttatggagtgaaaaaagaagacatcgacacaaacgttaggcctggaattgccatgcacaagaaaaacgaactttgccttgtcccaaaaaattatttataaattatattgggacgtggatctcatgctagttctgtgcggtcagctaagcttattatttttggctcaaattatgtatacataattagtacatgtttaaaatgtataaatatagtagaaccattctcatggtt

SEQ ID NO: 253 - protein, 495 aa, Nicotiana tabacum
MLFLLFVALPFILIFLLPKFKNGGNNRLPPGPIGLPFIGNLHQYDSITPHIYFWKLSKKYGKIFSLKLASTNVVVVSSAKLAKEVLKKQDLIFCSRPSILGQQKLSYYGRDIAFAPYNDYWREMRKICVLHLFSLKKVQLFSPIREDEVFRMIKKISKQASTSQIINLSNLMISLTSTIICRVAFGVRFEEEAHARKRFDFLLAEAQEMMASFFVSDFFPFLSWIDKLSGLTYRLERNFKDLDNFYEELIEQHQNPNKPKYMEGDIVDLLLQLKKEKLTPLDLTMEDIKGILMNVLVAGSDTSAAATVWAMTALIKNPKAMEKVQLEIRKSVGKKGIVNEEDVQNIPYFKAVIKEIFRLYPPAPLLVPRESMEKTILEGYEIRPRTIVHVNAWAIARDPEIWENPDEFIPERFLNSSIDYKGQDFELLPFGAGRRGCPGIALGVASMELALSNLLYAFDWELPYGVKKEDIDTNVRPGIAMHKKNELCLVPKNYL

SEQ ID NO: 254 - DNA, 1627 bp, Nicotiana tabacum
aaaattcataatggtttttcccatagaagcctttgtaggactagtaaccttcacatttctcttatacttcctatggacaaaaaaatctcaaaaacttccaaaacccttactaccgaaaatccccggaggatggccggtaatcggccatctttttcacttcaataacgacggcgacgaccgtccattagctcgaaaactcggagacttagctgataaatacggccccgttttcacttttcggctaggtcttccccttgtgctagttgtaagcagttacgaagctataaaagattgcttctctacaaatgacgccattttctccaatcgtccagcttttctttacggcgaataccttggctacaataatacaatgctttttctagcaaattacggaccttactggcgaaaaaatcgtaaattagtcattcaggaagttctctctgctagtcgtctcgaaaaattcaaacaagtgagattcaccagaattcaaacgagcattaagaatttatacactcgaattaatggaaattcgagtacgataaatctaactgattggttagaagaattggattttggtctgatcgtgaaaatgatcgctgggaaaaattatgaatccggtaaaggagatgaacaagtggaaagatttaagaatgcgtttaaggattttatggttttatcaatggaatttgtattatgggatgcatttccaattccattatttaaatgggtggattttcaaggtcatattaaggcaatgaaaaggacatttaaggatatagattctgtttttcagaactggttagaggaacatattaataaaagagaaaaaatggaggttggtgcagaagggaatgaacaagatttcattgatgtggtgctttcaaaattgagtaaagaatatcttgatgaaggttactctcgtgatactgtcattaaagcaacagtttttagtttggtcttggatgcagcagacacagttgctcttcacataaattggggaatgacattattgataaacaatcaaaatgccttgatgaaagcacaagaagagatagacacaaaagttggtaagtatagatgggtagaagagagtgatattaaggatttagtatacctccaagctattgttaaaaaggtgttacgattatatccaccaggacctttgttagtaccacatgaatatgtaaaggattgtgttgttagtggatatcacattcctaaagggactagattattcgcaaacgtcatgaaactgcagcgcgatcctaaactcttgtcaaatcctgataagttcgatccagagagattcatcgctggtgatatcgacttccgtggtcaccactatgagtttatcccatttggttctggaagacgatcttgtccggggatgacttatgcattgcaagtggaacacctaacaatggcacatttaatccagggtttcaattacaaaactccaaatgacgaggccttggatatgaaggaaggtgcaggcataacaatacgtaaggtaaatccggtggaattgataataacgcctcgcttggcacctgagctttactaaaacctaagatctttcatcttggttgatcattgtttaatactcctagatagatgggtattcatc

SEQ ID NO: 255 - protein, 517 aa, Nicotiana tabacum
MVFPIEAFVGLVTFTFLLYFLWTKKSQKLPKPLLPKIPGGWPVIGHLFHFNNDGDDRPLARKLGDLADKYGPVFTFRLGLPLVLVVSSYEAIKDCFSTNDAIFSNRPAFLYGEYLGYNNTMLFLANYGPYWRKNRKLVIQEVLSASRLEKFKQVRFTRIQTSIKNLYTRINGNSSTINLTDWLEELDFGLIVKMIAGKNYESGKGDEQVERFKNAFKDFMVLSMEFVLWDAFPIPLFKWVDFQGHIKAMKRTFKDIDSVFQNWLEEHINKREKMEVGAEGNEQDFIDVVLSKLSKEYLDEGYSRDTVIKATVFSLVLDAADTVALHINWGMTLLINNQNALMKAQEEIDTKVGKYRWVEESDIKDLVYLQAIVKKVLRLYPPGPLLVPHEYVKDCVVSGYHIPKGTRLFANVMKLQRDPKLLSNPDKFDPERFIAGDIDFRGHHYEFIPFGSGRRSCPGMTYALQVEHLTMAHLIQGFNYKTPNDEALDMKEGAGITIRKVNPVELIITPRLAPELY

SEQ ID NO: 256 - DNA, 1594 bp, Nicotiana tabacum
caaaaaatcatttctctcgtctaaaatggatcttctcttactagagaagaccttaattggtcttttctttgccattttaatcgctttaattgtctctaaacttcgttcaaagcgttttaagcttcctccaggaccaattccagtaccagtttttggtaattggcttcaagttggtgatgatttaaaccacagaaatcttactgattatgccaaaaaatttggcgatcttttcttgttaagaatgggtcaacgtaacttagttgttgtgtcatctcctgaattagctaaagaagttttacacacacaaggtgttgaatttggttcaagaacaagaaatgttgtgtttgatatttttactggaaaaggtcaagatatggtttttactgtatatggtgaacattggagaaaaatgaggagaattatgactgtaccattttttactaataaagttgtgcaacagtatagaggggggtgggagtttgaggtggcaagtgtaattgaggatgtgaaaaaaaatcctgaatctgctactaatgggatcgtattaaggaggagattacaattaatgatgtataataatatgtttaggattatgtttgataggagatttgagagtgaagatgatcctttgtttgttaagcttaaggctttgaatggtgaaaggagtagattggctcaaagttttgagtataattatggtgattttattccaattttgaggcctcttttgagaggttatttgaagatctgtaaagaagttaaggagaagaggctgcagcttttcaaagattactttgttgatgaaagaaagaagctttcaaataccaagagctcggacagcaatgccctaaaatgtgcgattgatcacattcttgaggctcaacagaagggagagatcaatgaggacaacgttctttacattgttgaaaacatcaatgttgctgcaattgaaacaacattatggtcaattgagtggggtatcgccgagctagtcaaccaccctcacatccaaaagaaactgcgcgacgagattgacacagttcttggaccaggagtgcaagtgactgaaccagacacccacaagcttccataccttcaggctgtgatcaaggaggcacttcgtctccgtatggcaattcctctattagtcccacacatgaaccttcacgacgcaaagcttggcgggcttgatattccagcagagagcaaaatcttggttaacgcttggtggttagctaacaacccggctcattggaagaaacccgaagagttcagacccgagaggttctttgaagaggagaagcatgttgaggccaatggcaatgacttcagatatcttccgtttggcgttggtaggaggagctgccctggaattatacttgcattgccaattcttggcatcactttgggacgtttggttcagaactttgagctgttgcctcctccaggccagtcgaagctcgacaccacagagaaaggtggacagttcagtctccacattttgaagcattccaccattgtgttgaaaccaaggtctttctgaactttgtgatcttattaattaaggggttctgaagaaatttgatagtgttgg

SEQ ID NO: 257 - protein, 505 aa, Nicotiana tabacum
MDLLLLEKTLIGLFFAILIALIVSKLRSKRFKLPPGPIPVPVFGNWLQVGDDLNHRNLTDYAKKFGDLFLLRMGQRNLVVVSSPELAKEVLHTQGVEFGSRTRNVVFDIFTGKGQDMVFTVYGEHWRKMRRIMTVPFFTNKVVQQYRGGWEFEVASVIEDVKKNPESATNGIVLRRRLQLMMYNNMFRIMFDRRFESEDDPLFVKLKALNGERSRLAQSFEYNYGDFIPILRPLLRGYLKICKEVKEKRLQLFKDYFVDERKKLSNTKSSDSNALKCAIDHILEAQQKGEINEDNVLYIVENINVAAIETTLWSIEWGIAELVNHPHIQKKLRDEIDTVLGPGVQVTEPDTHKLPYLQAVIKEALRLRMAIPLLVPHMNLHDAKLGGLDIPAESKILVNAWWLANNPAHWKKPEEFRPERFFEEEKHVEANGNDFRYLPFGVGRRSCPGIILALPILGITLGRLVQNFELLPPPGQSKLDTTEKGGQFSLHILKHSTIVLKPRSF

SEQ ID NO: 258 - DNA, 1678 bp, Nicotiana tabacum
aacattttgcaatatagttttcctagtcagttctagcctccttttccttagaaataatggattatcatatttctttccattttcaagctcttttagggcttttagcctttgtgttcttgtctattatcttatggagaagaacactcacttcaagaaaattagcccctgaaatcccaggggcatggcctattataggccatcttcgtcagctgagtggtactgataagaatatcccatttccccgaatattgggcgctttggcagataaatatggacctgtcttcacactgagaatagggatgtacccctatttgattgtcaacaattgggaagcagctaaggattgtctcacaacgcatgataaggacttcgctgcccgaccaacttctatggctggtgaaagcatcgggtacaagtatgcgaggtttacttatgctaattttggtccttattataaccaagtgcgcaaactagccctacaacatgtaccctcgagtactaaactcgagaaaatgaaacacatacgtgtttctgaattggaaactagcatcaaagaattatattctttgacgctgggcaaaaacaacatgcaaaaagtgaatataagtaaatggtttgaacaattgactttaaacataatcgtgaagacaatttgtggcaagagatatagcaacatagaggaggatgaagaggcacaacgtttcagaaaggcatttaagggcatcatgtttgttgtagggcaaattgttttatatgacgcaattccattcccattgttcaaatactttgatttccaaggtcatatacaattgatgaacaaaatttataaagacttagattctattcttcaaggatggttggatgatcatatgatgaacaaggatgtaaacaataaggatcaagatgccatagatgccatgcttaaggtaacacaacttaatgaattcaaagcctatggtttttctcaggccactgtgatcaagtcgacagtcttgagtttgatcttagatggaaatgacacaaccgctgttcatttgatatgggtaatgtccttattactgaacaatccacatgttatgaaacaaggccaagaagagatagacatgaaagtgggtaaagagaggtggattgaagatactgacataaaaaatttagtgtaccttcaggctatcgttaaagagacattgcgcttgtatccacctgttccttttcttttaccacacgaagcagtgcaagattgtaaagtgactggttaccacattcctaaaggtactcgtctatatatcaatgcgtggaaagtacatcgcgatcctgaaatttggtcagagcccgaaaagtttatgcccaatagattcttgactagcaaagcaaatatagatgctcgcggtcaaaattttgaatttataccgtttggttctgggagacggtcatgtccagggataggttttgcgactttagtgacacatctgacttttggtcgcttgcttcaaggttttgattttagtaagccatcaaacacgccaattgacatgacagaaggcgtaggcgttactttgcctaaggttaatcaagttgaagttctaattacccctcgtttaccttctaagctttatttattttgaaagtgcaaatcatcaatcatggcttgagtaattagttatactttaatatgtttctc

SEQ ID NO: 259 - protein, 521 aa, Nicotiana tabacum
MDYHISFHFQALLGLLAFVFLSIILWRRTLTSRKLAPEIPGAWPIIGHLRQLSGTDKNIPFPRILGALADKYGPVFTLRIGMYPYLIVNNWEAAKDCLTTHDKDFAARPTSMAGESIGYKYARFTYANFGPYYNQVRKLALQHVPSSTKLEKMKHIRVSELETSIKELYSLTLGKNNMQKVNISKWFEQLTLNIIVKTICGKRYSNIEEDEEAQRFRKAFKGIMFVVGQIVLYDAIPFPLFKYFDFQGHIQLMNKIYKDLDSILQGWLDDHMMNKDVNNKDQDAIDAMLKVTQLNEFKAYGFSQATVIKSTVLSLILDGNDTTAVHLIWVMSLLLNNPHVMKQGQEEIDMKVGKERWIEDTDIKNLVYLQAIVKETLRLYPPVPFLLPHEAVQDCKVTGYHIPKGTRLYINAWKVHRDPEIWSEPEKFMPNRFLTSKANIDARGQNFEFIPFGSGRRSCPGIGFATLVTHLTFGRLLQGFDFSKPSNTPIDMTEGVGVTLPKVNQVEVLITPRLPSKLYLF

SEQ ID NO: 260 - DNA, 1537 bp, Nicotiana tabacum
tgataatgctctttctactctttgtagcccttcctttcattcttatttttcttcttcctaaattcaaaaatggtggaaataacagattgccaccaggtcctataggtttaccattcattggaaatttgcatcaatatgatagtataactcctcatatctatttttggaaactttccaaaaaatatggcaaaatcttctcattaaaacttgcttctactaatgtggtagtagtttcttcagcaaaattagcaaaagaagtattgaaaaaacaagatttaatattttgtagtagaccatctattcttggccaacaaaaactgtcttattatggtcgtgatattgcttttgcaccttataatgattattggagagaaatgagaaaaatttgtgttcttcatctttttagtttaaaaaaagttcaattatttagtccaattcgtgaagatgaagtttttagaatgattaagaaaatatcaaaacaagcttctacttcacaaattattaatttgagtaatttaatgatttcattaacaagtacaattatttgtagagttgcttttggtgttaggtttgaagaagaagcacatgcaaggaagagatttgattttcttttggccgaggcacaagaaatgatggctagtttctttgtatctgatttttttccctttttaagttggattgataaattaagtggattgacatatagacttgagaggaatttcaaggatttggataatttttatgaagaactcattgagcaacatcaaaatcctaataagccaaaatatatggaaggagatattgttgatcttttgctacaattgaagaaagagaaattaacaccacttgatctcactatggaagatataaaaggaattctcatgaatgtgttagttgcaggatcagacactagtgcagctgctactgtttgggcaatgacagccttgataaagaatcctaaagccatggaaaaagttcaattagaaatcagaaaatcagttgggaagaaaggcattgtaaatgaagaagatgtccaaaacatcccttattttaaagcagtgataaaggaaatatttagattgtatccaccagctccacttttagttccaagagaatcaatggaaaaaaccatattagaaggttatgaaattcggccaagaaccatagttcatgttaacgcttgggctatagcaagggatcctgaaatatgggaaaatccagatgaatttatacctgagagatttttgaatagcagtaccgattacaagggtcaagattttgagttacttccatttggtgcaggcagaagaggttgcccaggtattgcacttggggttgcatccatggaacttgctttgtcaaatcttctttatgcatttgattgggagttgccttatggagtgaaaaaagaagacatcgacacaaacgttaggcctggaattgccatgcacaagaaaaacgaactttgccttgtcccaaaaaattatttataaattatattgggacgtggatctcaatttagttctgtgaggtcagc

SEQ ID NO: 261 - protein, 495 aa, Nicotiana tabacum
MLFLLFVALPFILIFLLPKFKNGGNNRLPPGPIGLPFIGNLHQYDSITPHIYFWKLSKKYGKIFSLKLASTNVVVVSSAKLAKEVLKKQDLIFCSRPSILGQQKLSYYGRDIAFAPYNDYWREMRKICVLHLFSLKKVQLFSPIREDEVFRMIKKISKQASTSQIINLSNLMISLTSTIICRVAFGVRFEEEAHARKRFDFLLAEAQEMMASFFVSDFFPFLSWIDKLSGLTYRLERNFKDLDNFYEELIEQHQNPNKPKYMEGDIVDLLLQLKKEKLTPLDLTMEDIKGILMNVLVAGSDTSAAATVWAMTALIKNPKAMEKVQLEIRKSVGKKGIVNEEDVQNIPYFKAVIKEIFRLYPPAPLLVPRESMEKTILEGYEIRPRTIVHVNAWAIARDPEIWENPDEFIPERFLNSSTDYKGQDFELLPFGAGRRGCPGIALGVASMELALSNLLYAFDWELPYGVKKEDIDTNVRPGIAMHKKNELCLVPKNYL

SEQ ID NO: 262 - DNA, 1572 bp, Nicotiana tabacum
ccaaaatcatggctctatctttcatattcatatccataaccctaatttttctagttcataaactctaccaccgtcttagattcaaactaccaccaggtccgcggccgttaccggtggtcggaaacctctacgacataaaaccggtgagattccggtgctttgccgattgggccaaaacttacggtccgattttctcagtatactttgggtcacagttaaatgttgtggtaacaacagctgaattagctaaagaagtattgaaagaaaatgaccagaatttagcagatagatttaggactagacctgcaaataatttgagcagaaatgggatggatttgatttgggctgattatgggcctcattatgtgaaagtaaggaagctctgtaatcttgagctttttactcctaaaagacttgaagctcttagacctattagagaagatgaagttactgctatggttgaaaacattttcaaggattgtactaagcctgataacacaggtaaaagcttgttgataagagagtacttaggatcagtagcattcaacaacattacaaggttaacatttgggaaaaggttcatgaactcaaaaggtgagattgatgagcaaggtcaagaattcaagggtattgtctctaatggcatcaaaattggcggaaaacttcccttggcagagtatgttccatggctccgttggtttttcacaatggaaaacgaggcactcgtgaagcactctgcacgtagagaccggttaacaagaatgatcatggatgaacacacactggctcgcaagaaaactggtgatactaagcagcattttgtcgatgcattgcttactcttcagaagcagtatgatcttagtgatgacactgttattggcctcctctgggatatgattacagcaggaatggacacaacaaccataacagtggaatgggcaatggcagaactagttaagaacccaagagtgcaactaaaagctcaagaggagcttgacagggtaatcggaacggatcgaatcatgtcagaaaccgatttctctaaacttccttacctacaatgtgtagccaaagaggctctaaggttgcaccctccaactcctctaatgcttcctcataaggccagtgccagtgtcaaaattggtggttatgacattcctaaggggtccatcgtgcacgtgaacgtttgggctgtcgctcgtgacccagccgtgtggaagaacccgttggagttcagaccagagcgcttccttgaggaagacgttgacatgaagggtcacgactatcggttattgccctttggtgcaggaaggcgtgtttgccccggtgcacaacttgctatcaacttggtcacatctatgttgggtcatttgttgcatcattttacatgggctccggccccgggggttaacccggaggatattgacttggaggagagccctggaacagtaacttacatgaaaaatccaatacaagctattccaactccaagattgcctgcacacttgtatggacgtgtgccagtggatatgtaaaacattttgttctttccctttttggttatatgatgag

SEQ ID NO: 263 - protein, 508 aa, Nicotiana tabacum
MALSFIFISITLIFLVHKLYHRLRFKLPPGPRPLPVVGNLYDIKPVRFRCFADWAKTYGPIFSVYFGSQLNVVVTTAELAKEVLKENDQNLADRFRTRPANNLSRNGMDLIWADYGPHYVKVRKLCNLELFTPKRLEALRPIREDEVTAMVENIFKDCTKPDNTGKSLLIREYLGSVAFNNITRLTFGKRFMNSKGEIDEQGQEFKGIVSNGIKIGGKLPLAEYVPWLRWFFTMENEALVKHSARRDRLTRMIMDEHTLARKKTGDTKQHFVDALLTLQKQYDLSDDTVIGLLWDMITAGMDTTTITVEWAMAELVKNPRVQLKAQEELDRVIGTDRIMSETDFSKLPYLQCVAKEALRLHPPTPLMLPHKASASVKIGGYDIPKGSIVHVNVWAVARDPAVWKNPLEFRPERFLEEDVDMKGHDYRLLPFGAGRRVCPGAQLAINLVTSMLGHLLHHFTWAPAPGVNPEDIDLEESPGTVTYMKNPIQAIPTPRLPAHLYGRVPVDM

SEQ ID NO: 264 - DNA, 1580 bp, Nicotiana tabacum
aatcactaattttcatgtactctcataggtcaaaagtttcaaccaaaatcatggctctatccttcatattcatatccataaccctaatttttctagttcataaactctaccaccgtcttagattcaaactaccaccaggtccgcggccgttaccggtggtcggaaacctctacgacatagaaccggtgagattccggtgctttgccgattgggccaaaacttacggtccgattttctcagtatactttgggtcacagttaaatgttgtggtaacaacagctgaattagctaaagaagtattgaaagaaaatgaccagaatttagcagatagatttaggactagacctgcaaataatttgagcagaaatgggatggatttgatttgggctgattatgggcctcattatgtgaaagtaaggaagctctgtaatcttgagctttttactcctaaaagacttgaagctcttagacctattagagaagatgaagttactgctatggttgaaaacattttcaaggattgtactaagcctgataacacaggtaaaagcttgttgataagagagtacttaggatcagtagcattcaacaacattacaaggttaacatttgggaaaaggttcatgaactcaaaaggtgagattgatgagcaaggtcaagaattcaagggtattgtctctaatggcatcaaaattggcggaaaacttcccttggcagagtatgttccatggctccgttggtttttcacaatggaaaacgaggcactcgtgaagcactctgcacgtagagaccggttaacaagaatgatcatggatgaacacacactggctcgcaagaaaactggtgatactaagcagcattttgtcgatgcattgcttactcttcagaagcagtatgatcttagtgatgacactgttattggcctcctctgggatatgattacagcaggaatggacacaacaaccataacagtggaatgggcaatggcagaactagttaagaacccaagagtgcaactaaaagctcaagaggagcttgacagggtaatcggaacggatcgaatcatgtcagaaaccgatttctctaaacttccttacctacaatgtgtagccaaagaggctctaaggttgcaccctccaactcctctaatgcttcctcatagggccagtgccagtgtcaaaattggtggttatgacattcctaaggggtccatcgtgcacgtgaacgtttgggctgtcgctcgtgacccagccgtgtggaagaacccgttggagttcagaccagagcgcttccttgaggaagacgttgacatgaagggtcacgactatcggttattgccctttggtgcaggaaggcgtgtttgccccggtgcacaacttgctatcaacttggtcacatctatgttgggtcatttgttgcatcattttacatgggctccggccccgggggttaacccggaggatattgacttggaggagagccctggaacagtaacttacatgaaaaatccaatacaagctattccaactccaagattgcctgcacacttgtatggacgtgtgccagtggatatgtaaaac

SEQ ID NO: 265 - protein, 520 aa, Nicotiana tabacum
MYSHRSKVSTKIMALSFIFISITLIFLVHKLYHRLRFKLPPGPRPLPVVGNLYDIEPVRFRCFADWAKTYGPIFSVYFGSQLNVVVTTAELAKEVLKENDQNLADRFRTRPANNLSRNGMDLIWADYGPHYVKVRKLCNLELFTPKRLEALRPIREDEVTAMVENIFKDCTKPDNTGKSLLIREYLGSVAFNNITRLTFGKRFMNSKGEIDEQGQEFKGIVSNGIKIGGKLPLAEYVPWLRWFFTMENEALVKHSARRDRLTRMIMDEHTLARKKTGDTKQHFVDALLTLQKQYDLSDDTVIGLLWDMITAGMDTTTITVEWAMAELVKNPRVQLKAQEELDRVIGTDRIMSETDFSKLPYLQCVAKEALRLHPPTPLMLPHRASASVKIGGYDIPKGSIVHVNVWAVARDPAVWKNPLEFRPERFLEEDVDMKGHDYRLLPFGAGRRVCPGAQLAINLVTSMLGHLLHHFTWAPAPGVNPEDIDLEESPGTVTYMKNPIQAIPTPRLPAHLYGRVPVDM

SEQ ID NO: 266 - DNA, 1544 bp, Nicotiana tabacum
ataatgctctttctactctttgtagcccttcctttcattcttatttttcttcttcctaaattcaaaaatggtggaaataacagattgccaccaggtcctataggtttaccattcattggaaatttgcatcaatatgatagtataactcctcatatctatttttggaaactttccaaaaaatatggcaaaatcttctcattaaaacttgcttctactaatgtggtagtagtttcttcagcaaaattagcaaaagaagtattgaaaaaacaagatttaatattttgtagtagaccatctattcttggccaacaaaaactgtcttattatggtcgtgatattgcttttgcaccttataatgattattggagagaaatgagaaaaatttgtgttcttcatctttttagtttaaaaaaagttcaattatttagtccaattcgtgaagatgaagtttttagaatgattaagaaaatatcaaaacaagcttctacttcacaaattattaatttgagtaatttaatgatttcattaacaagtacaattatttgtagagttgcttttggtgttaggtttgaagaagaagcacatgcaaggaagagatttgattttcttttggccgaggcacaagaaatgatggctagtttctttgtatctgatttttttccctttttaagttagattgacaaattaagtggattgacatatagacttgagaggaatttcaaggatttggataatttttatgaagaactcattgagcaacatcaaaatcctaataagccaaaatatatggaaggagatattgttgatcttttgctacaattgaagaaagagaaattaacaccacttgatctcactatggaagatataaaaggaattctcatgaatgtgttagttgcaggatcagacactagtgcagctgctactgtttgggcaatgacagccttgataaagaatcctaaagccatggaaaaagttcaattagaaatcagaaaatcagttgggaagaaaggcattgtaaatgaagaagatgtccaaaacatcccttattttaaagcagtgataaaggaaatatttagattgtatccaccagctccacttttagttccaagagaatcaatggaaaaaaccatattagaaggttatgaaattcggccaagaaccatagttcatgttaacgcttgggctatagcaagggatcctgaaatatgggaaaatccagatgaatttatacctgagagatttttgaatagcagtatcgattacaagggtcaagattttgagttacttccatttggtgcaggcagaagaggttgcccaggtattgcacttggggttgcatccatggaacttgctttgtcaaatcttctttatgcatttgattgggagttgccttatggagtgaaaaaagaagacatcgacacaaacgttaggcctggaattgccatgcacaagaaaaacgaactttgccttgtcccaaaaaaattatttataaattatattgggacgtggatctcatgctagttctgtgcggtcagctaagctta

SEQ ID NO: 267 - protein, 223 aa, Nicotiana tabacum
MLFLLFVALPFILIFLLPKFKNGGNNRLPPGPIGLPFIGNLHQYDSITPHIYFWKLSKKYGKIFSLKLASTNVVVVSSAKLAKEVLKKQDLIFCSRPSILGQQKLSYYGRDIAFAPYNDYWREMRKICVLHLFSLKKVQLFSPIREDEVFRMIKKISKQASTSQIINLSNLMISLTSTIICRVAFGVRFEEEAHARKRFDFLLAEAQEMMASFFVSDFFPFLS

SEQ ID NO: 268 - DNA, 1615 bp, Nicotiana tabacum
cacattgagtcctctcccaaatcactgattcaccaccaaaagtaccaacaattcaatggaaggtacaaacttgactacatatgcagcagtatttcttgatactctgtttcttttgttcctttccaaacttcttcgccagaggaaactcaatttacctccaggcccaaaaccatggccgatcatcggaaacttaaaccttattggcaatcttcctcatcgctcaatccacgaactctccctcaagtacggacccgttatgcaactccaattcgggtctttccccgttgtagttggatcctccgtcgaaatggctaagattttcctcaaatccatggatattaactttgtaggcaggcctaaaacggctgccggaaaatacacaacgtacaattattccgatattacatggtctccttacggaccatattggcgccaggcacgtaggatgtgcctaacggaattattcagcacgaaacgtctcgattcatacgagtatattcgggctgaggagttgcattctcttctccataatttgaacaaaatatcagggaaaccaattgtgttgaaagattatttgacgacgttgagtttaaatgttattagcaggatggtactggggaaaaggtatttggacgaatccgagaactcgttcgtgaatcctgaggaatttaagaagatgttggacgaattgtttttgctaaatggtgtacttaatattggagattcaattccatggattgatttcatggatttgcaaggttatgttaagaggatgaaagtagtgagcaagaaattcgacaagtttttagagcatgttattgatgagcataacattaggagaaatggagtggagaattatgttgctaaggatatggtggatgttttgttgcagcttgctgatgatccgaagttggaagttaagctggagagacatggagtcaaagcattcactcaggatatgctggctggtggaaccgagagttcagcagtgacagtggagtgggcaatttcagagctgctaaagaagccggagattttcaaaaaggctacagaagaattggatcgagtaattgggcagaatagatgggtacaagaaaaggacattccaaatcttccttacatagaggcaatagtcaaagagactatgcgactgcaccccgtggcaccaatgttggtgccacgtgagtgtcgagaagatattaaggtagcaggctacgacgttcagaaaggaactagggttctcgtgagtgtatggactattggaagagaccctacattgtgggacgagcctgaggtgttcaagccggagagattccatgaaaagtccatagatgttaaaggacatgattatgagcttttgccatttggagcggggagaagaatgtgcccgggttatagcttggggctcaaggtgattcaagctagcttagctaatcttctacatggatttaactggtcattgcctgataatatgactcctgaggacctcaacatggatgagatttttgggctctctacacctaaaaaatttccacttgctactgtgattgagccaagactttcaccaaaactttactctgtttgattcagcagttctatggttccgtcaagatag

SEQ ID NO: 269 - protein, 509 aa, Nicotiana tabacum
MEGTNLTTYAAVFLDTLFLLFLSKLLRQRKLNLPPGPKPWPIIGNLNLIGNLPHRSIHELSLKYGPVMQLQFGSFPVVVGSSVEMAKIFLKSMDINFVGRPKTAAGKYTTYNYSDITWSPYGPYWRQARRMCLTELFSTKRLDSYEYIRAEELHSLLHNLNKISGKPIVLKDYLTTLSLNVISRMVLGKRYLDESENSFVNPEEFKKMLDELFLLNGVLNIGDSIPWIDFMDLQGYVKRMKVVSKKFDKFLEHVIDEHNIRRNGVENYVAKDMVDVLLQLADDPKLEVKLERHGVKAFTQDMLAGGTESSAVTVEWAISELLKKPEIFKKATEELDRVIGQNRWVQEKDIPNLPYIEAIVKETMRLHPVAPMLVPRECREDIKVAGYDVQKGTRVLVSVWTIGRDPTLWDEPEVFKPERFHEKSIDVKGHDYELLPFGAGRRMCPGYSLGLKVIQASLANLLHGFNWSLPDNMTPEDLNMDEIFGLSTPKKFPLATVIEPRLSPKLYSV

SEQ ID NO: 270 - DNA, 1610 bp, Nicotiana tabacum; identical to SEQ ID NO: 206

SEQ ID NO: 271 - protein, 503 aa, Nicotiana tabacum; identical to SEQ ID NO: 207

SEQ ID NO: 272 - DNA, 1611 bp, Nicotiana tabacum
ctttcatcatatggcatgaaatgggaaatgctcacaacagcaaaattgcagcaatctgtttgataattttcttggtatataaagcatgggaattgttgaagtggatatggattaagccaaagaaactggagagttgcctcagaaaacagggactcaaaggaaattcctacgggctattctatggagatatgaaagaattgtccaaaagtctcaaggaaatcaattcaaagcccatcatcaatctatcaaatgaagtagccccaagaatcattccttattatcttgaaatcatccaaaaatatggtaaaagatgttttgtttggcaaggaccaacccccgcaatattaataacagagccagaattaataaaggagatatttggtaagaactatgtttttcagaagcctaataatcccaacccactgaccaagttattggctcgaggtgttgtaagctacgaggaagaaaaatgggcaaaacacagaaagatcttaaatcctgcctttcatatggagaagttgaagcatatgctaccagcattttacttgagctgtagtgagatgctgaacaaatgggaggagattatcccagtaaaagaatcaaatgagttggacatttggcctcatcttcaaagaatgacaagtgatgtgatttctcgtgctgcctttggtagtagctacgaagaaggaagaagaatatttgaacttcaagaagaacaagctgagtatctaacgaagacattcaattcagtttatatcccaggttccagattttttcccaataaaatgaacaaaagaatgaaagaatgtgaaaaggaagtacgagaaacaattacgtgtctaattgacaacagattaaaggcaaaagaagaaggcaatggcaaggccctcaatgatgacctattgggtatattattagagtcaaattctatagaaattgaagaacatggtaacaagaagtttggaatgagtatacctgaagtaattgaagagtgcaaattattctattttgctggccaagagactacatcagtattgcttgtgtggacactgattttgttagggagaaatccagaatggcaggaacgtgctagagaggaagtttttcaagcctttggaagtgataaaccaacttttgacgaattatatcgcttgaaaattgtgacgatgattttgtacgagtctttaaggttatatccaccaatagcaactcgtactcgaaggactaatgaagaaacaaaattaggggaactagatttaccaaagggtgcactgctctttataccaacaatcttattacatcttgacagggaaatttggggtgaagatgcagatgagttcaatccggagagatttagcgaaggggtggcaaaggcaacaaaggggaaaatgacatattttccatttggtgcaggaccgcgaaaatgcattgggcaaaacttcgcgattttggaagcaaaaatggctatagctatgattctacaacgcttctccttcgagctctctccatcttatacacactctccatacactgtggtcactttgaaacccaaatatggtgctcccctaataatgcacaggctgtagtcctgtgagaatatgctatccgagg

SEQ ID NO: 273 - protein, 521 aa, Nicotiana tabacum
MGNAHNSKIAAICLIIFLVYKAWELLKWIWIKPKKLESCLRKQGLKGNSYGLFYGDMKELSKSLKEINSKPIINLSNEVAPRIIPYYLEIIQKYGKRCFVWQGPTPAILITEPELIKEIFGKNYVFQKPNNPNPLTKLLARGVVSYEEEKWAKHRKILNPAFHMEKLKHMLPAFYLSCSEMLNKWEEIIPVKESNELDIWPHLQRMTSDVISRAAFGSSYEEGRRIFELQEEQAEYLTKTFNSVYIPGSRFFPNKMNKRMKECEKEVRETITCLIDNRLKAKEEGNGKALNDDLLGILLESNSIEIEEHGNKKFGMSIPEVIEECKLFYFAGQETTSVLLVWTLILLGRNPEWQERAREEVFQAFGSDKPTFDELYRLKIVTMILYESLRLYPPIATRTRRTNEETKLGELDLPKGALLFIPTILLHLDREIWGEDADEFNPERFSEGVAKATKGKMTYFPFGAGPRKCIGQNFAILEAKMAIAMILQRFSFELSPSYTHSPYTVVTLKPKYGAPLIMHRL

SEQ ID NO: 274 - DNA, 1570 bp, Nicotiana tabacum
ctcattatccatcacctaaaatggagaattcttgggtttttctagccttggcagggctatctgcattagcttttctctgtaaaataatcacctgtcgaagaccggttaaccggaaaataccaccaggtccaaaaccatggcccatcattggcaatttgaacctacttggtcctataccacatcaatcttttgacttgctttccaaaaaatatggagagttgatgctgctgaaatttggctccaggccagttcttgttgcttcatctgctgaaatggcaaaacagtttttaaaagtacatgatgctaatttcgcctcccgtcctatgctagctggtggaaagtatacaagctataactattgtgacatgacatgggcaccctatggtccctattggcgccaagcacgacgaatttaccttaaccagatatttactccgaaaaggctagactcgttcgagtacattcgtgttgaagaaaggcaggccttgatttcccagctgaattcccttgctggaaagccattttttctcaaagaccatttgtcgcgatttagcctctgcagcatgacaaggatggttttgagcaacaagtattttggtgaatcaacagttagagtagaagatttgcagtacctggtagatcaatggttcttacttaatggtgctttcaacattggagattggattccatggctcagcttcttggacctacaaggctatgtgaaacaaatgaaggctttgaaaagaacttttgataagttccacaacattgtgctagatgatcacagggctaagaagaatgcagagaagaactttgtcccaaaagacatggttgatgtcttgttgaagatggctgaagatcctaatctggaagtcaaactcactaatgactgtgtcaaagggttaatgcaggatttactaactggaggaacagatagcttaacagcagcagtgcaatgggcatttcaagaacttcttagacagccaagggttattgagaaggcaaccgaagagcttgaccggattgtcgggaaagagagatgggtagaagagaaagattgctcgcagctatcttacgttgaagcaatcctcaaggaaacactaaggttacatcctctaggaactatgctagcaccgcattgtgctatagaagattgtaacgtggctggttatgacatacagaaaggaacgacctttctggtgaatgtttggaccattggaagggacccaaaatactgggatagagcacaagagtttctccccgagagatttttagagaacgacattgatatggacggacataactttgctttcttgccatttggctcggggcgaaggaggtgccctggctatagccttggacttaaggttatccgagtaacattagccaacatgttgcatggattcaactggaaattacctgaaggtatgaagccagaagatataagtgtggaagaacattatgggctcactacacatcctaagtttcctgttcctgtgatcttggaatctagactttcttcagatctctattcccccatcacttaatcctaagtgcttcctattatagc

SEQ ID NO: 275 - protein, 508 aa, Nicotiana tabacum
MENSWVFLALAGLSALAFLCKIITCRRPVNRKIPPGPKPWPIIGNLNLLGPIPHQSFDLLSKKYGELMLLKFGSRPVLVASSAEMAKQFLKVHDANFASRPMLAGGKYTSYNYCDMTWAPYGPYWRQARRIYLNQIFTPKRLDSFEYIRVEERQALISQLNSLAGKPFFLKDHLSRFSLCSMTRMVLSNKYFGESTVRVEDLQYLVDQWFLLNGAFNIGDWIPWLSFLDLQGYVKQMKALKRTFDKFHNIVLDDHRAKKNAEKNFVPKDMVDVLLKMAEDPNLEVKLTNDCVKGLMQDLLTGGTDSLTAAVQWAFQELLRQPRVIEKATEELDRIVGKERWVEEKDCSQLSYVEAILKETLRLHPLGTMLAPHCAIEDCNVAGYDIQKGTTFLVNVWTIGRDPKYWDRAQEFLPERFLENDIDMDGHNFAFLPFGSGRRRCPGYSLGLKVIRVTLANMLHGFNWKLPEGMKPEDISVEEHYGLTTHPKFPVPVILESRLSSDLYSPIT

SEQ ID NO: 276 - DNA, 1617 bp, Nicotiana tabacum
cacattgagtcctctcccaaatcactgattcaccaccaaaagtaccaacaattcaatggaaggtacaaacttgactacatatgcagcagtatttcttgatactctgtttcttttgttcctttccaaacttcttcgccagaggaaactcaatttacctccaggcccaaaaccatggccgatcatcggaaacttaaaccttattggcaatcttcctcatcgctcaatccacgaactctccctcaagtacggacccgttatgcaactccaattcgggtctttccccgttgtagttggatcctccgtcgaaatggctaagattttcctcaaatccatggatattaactttgtaggcaggcctaaaacggctgccggaaaatacacaacgtacaattattccgatattacatggtctccttacggaccatattggcgccaggcacgtaggatgtgcctaacggaattattcagcacgaaacgtctcgattcatacgagtatattcgggctgaggagttgcattctcttctccataatttgaacaaaatatcagggaaaccaattgtgttgaaagattatttgacgacgttgagtttaaatgttattagcaggatggtactggggaaaaggtatttggacgaatccgagaactcgttcgtgaatcctgaggaatttaagaagatgttggacgaattgtttttgctaaatggtgtacttaatattggagattcaattccatggattgatttcatggatttgcaaggttatgttaagaggatgaaagtagtgagcaagaaattcgacaagtttttagagcatgttattgatgagcataacattaggagaaatggagtggagaattatgttgctaaggatatggtggatgttttgttgcagcttgctgatgatccgaagttggaagttaagctggagagacatggagtcaaagcattcactcaggatatgctggctggtggaaccgagagttcagcagtgacagtggagtgggcaatttcagagctgctaaagaagccggagattttcaaaaaggctacagaagaattggatcgagtaattgggcagaatagatgggtacaagaaaaggacattccaaatcatccttacatagaggcaatagtcaaagagactatgcgactgcaccccgtggcaccaatgttggtgccacgtgagtgtcgagaagatattaaggtagcaggctacgacgttcagaaaggaactagggttctcgtgagtgtatggactattggaagagaccctacattgtgggacgagcctgaggtgttcaagccggagagattccatgaaaagtccatagatgttaaaggacatgattatgagcttttgccatttggagcggggagaagaatgtgcccgggttatagcttggggctcaaggtgattcaagctagcttagctaatcttctacatggatttaactggtcattgcctgataatatgactcctgaggacctcaacatggatgagatttttgggctctctacacctaaaaaatttccacttgctactgtgattgagccaagactttcaccaaaactttactctgtttgattcagcagttctatggatccgtcaagatagac

SEQ ID NO: 277 - protein, 509 aa, Nicotiana tabacum
MEGTNLTTYAAVFLDTLFLLFLSKLLRQRKLNLPPGPKPWPIIGNLNLIGNLPHRSIHELSLKYGPVMQLQFGSFPVVVGSSVEMAKIFLKSMDINFVGRPKTAAGKYTTYNYSDITWSPYGPYWRQARRMCLTELFSTKRLDSYEYIRAEELHSLLHNLNKISGKPIVLKDYLTTLSLNVISRMVLGKRYLDESENSFVNPEEFKKMLDELFLLNGVLNIGDSIPWIDFMDLQGYVKRMKVVSKKFDKFLEHVIDEHNIRRNGVENYVAKDMVDVLLQLADDPKLEVKLERHGVKAFTQDMLAGGTESSAVTVEWAISELLKKPEIFKKATEELDRVIGQNRWVQEKDIPNHPYIEAIVKETMRLHPVAPMLVPRECREDIKVAGYDVQKGTRVLVSVWTIGRDPTLWDEPEVFKPERFHEKSIDVKGHDYELLPFGAGRRMCPGYSLGLKVIQASLANLLHGFNWSLPDNMTPEDLNMDEIFGLSTPKKFPLATVIEPRLSPKLYSV

SEQ ID NO: 278 - DNA, 1657 bp, Nicotiana tabacum
tgcaatatagttttcctagtcagttctagcctccttttccttagaaataatggattatcatatttctttccattttcaagctcttttagggcttttagcctttgtgttcttgtctattatcttatggagaagaacactcacttcaagaaaattagcccctgaaatcccaggggcatggcctattataggccatcttcgtcagctgagtggtactgataagaatatcccatttccccgaatattgggcgctttggcagataaatatggacctgtcttcacactgagaatagggatgtacccctatttgattgtcaacaattgggaagcagctaaggattgtctcacaacgcatgataaggacttcgctgcccgaccaacttctatggctggtgaaagcatcgggtacaagtatgcgaggtttacttatgctaattttggtccttattataaccaagtgcgcaaactagccctacaacatgtactctcgagtactaaactcgagaaaatgaaacacatacgtgtttctgaattggaaactagcatcaaagaattatattctttgacgctgggcaaaaacaacatgcaaaaagtgaatataagtaaatggtttgaacaattgactttaaacataatcgtgaagacaatttgtggcaagagatatagcaacatagaggaggatgaagaggcacaacgtttcagaaaggcatttaagggcatcatgtttgttgtagggcaaattgttttatatgacgcaattccattcccattgttcaaatactttgatttccaaggtcatatacaattgatgaacaaaatttataaagacttagattctattcttcaaggatggttggatgatcatatgatgaacaaggatgtaaacaataaggatcaagatgccatagatgccatgcttaaggtaacacaacttaatgaattcaaagcctatggtttttctcaggccactgtgatcaagtcgacagtcttgagtttgatcttagatggaaatgacacaaccgctgttcatttgatatgggtaatgtccttattactgaacaatccacatgttatgaaacaaggccaagaagagatagacatgaaagtgggtaaagagaggtggattgaagatactgacataaaaaatttagtgtaccttcaggctatcgttaaagagacattgcgcttgtatccacctgttccttttcttttaccacacgaagcagtgcaagattgtaaagtgactggttaccacattcctaaaggtactcgtctatatatcaatgcgtggaaagtacatcgcgattctgaaatttggtcagagcccgaaaagtttatgcccaatagattcttgactagcaaagcaaatatagatgctcgcggtcaaaattttgaatttataccgtttggttctgggagacggtcatgtccagggttaggttttgcgactttagtgacacatctgacttttggtcgcttgcttcaaggttttgattttagtaagccatcaaacacgccaattgacatgacagaaggcgtaggcgttactttgcctaaggttaatcaagttgaagttctaattacccctcgtttaccttctaagctttatttattttgaaagtgcaaatcatcaatcatgggttgagtaattagtgatact

SEQ ID NO: 279 - protein, 521 aa, Nicotiana tabacum
MDYHISFHFQALLGLLAFVFLSIILWRRTLTSRKLAPEIPGAWPIIGHLRQLSGTDKNIPFPRILGALADKYGPVFTLRIGMYPYLIVNNWEAAKDCLTTHDKDFAARPTSMAGESIGYKYARFTYANFGPYYNQVRKLALQHVLSSTKLEKMKHIRVSELETSIKELYSLTLGKNNMQKVNISKWFEQLTLNIIVKTICGKRYSNIEEDEEAQRFRKAFKGIMFVVGQIVLYDAIPFPLFKYFDFQGHIQLMNKIYKDLDSILQGWLDDHMMNKDVNNKDQDAIDAMLKVTQLNEFKAYGFSQATVIKSTVLSLILDGNDTTAVHLIWVMSLLLNNPHVMKQGQEEIDMKVGKERWIEDTDIKNLVYLQAIVKETLRLYPPVPFLLPHEAVQDCKVTGYHIPKGTRLYINAWKVHRDSEIWSEPEKFMPNRFLTSKANIDARGQNFEFIPFGSGRRSCPGLGFATLVTHLTFGRLLQGFDFSKPSNTPIDMTEGVGVTLPKVNQVEVLITPRLPSKLYLF

SEQ ID NO: 280 - DNA, 1620 bp, Nicotiana tabacum
agagagtgaaaatggacgcactacttcaaatgacagtaacagcatcttgtgctgccatagtaattactctgctggtgtgtatatggagagtgctgaactggatttggttcagaccaaagaaattggagttgttgttgagaaaacaaggtttggaaggaaattcttacaaggttttgtatggggacatgaaagagttttctgggatgattaaggaagcatactcaaagcctatgagtctatctgatgatgtagcaccaagactgatgcctttctttcttgaaaccatcaaaaaatatggaaaaagatcctttatatggtttggtccaagaccactagtattgattatggatcctgagcttataaaggaagtactctcaaaaatccatctgtatcaaaagcctggtggaaatccattagcaacactattggtacaaggaatagcaacctatgaggaagacaaatgggccaaacatagaaaaatcatcaatcccgctttccatctagagaagctaaagcttatgcttccagcatttcgcttaagctgtagtgagatgctgagcaaatgggaagacattgtttcagctgatagctcacatgagatagatgtatggtctcaccttgagcaattgacttgcgatgtgatctctcggacagcttttggcagtagttatgaagaaggtagaaagatttttgaacttcaaaaggaacaagctcagtatcttgtggaagttttccgctccgtttatatcccaggaaggagatttttgccaacaaagaggaatagaagaatgaaggaaataaaaaaggatgtccgggcatcaattaaaggtattattgataaaagattgaaggcaatgaaagcaggggacaccaataatgaggatctattgggtatattactggaatcgaatattaaagaaattgaacagcacggaaacaaggattttggaatgagcattgaagaagtcattgaagaatgcaagttattctattttgctggccaagaaactacatcagtgttactcctatggtctctagtgttgttgagcaggtatcaagattggcaggcacgggccagagaagaaatcttgcaagtctttggcagtcgaaaaccagattttgacggattaaatcatctaaaaattgtgacaatgatcttgtacgagtctttaaggctgtatccctcactaataacacttacccgccggtgtaatgaagacattgtattaggagaactatctctaccagctggtgttctagtctctttgccattgattttgttgcatcatgatgaagagatatggggtgaagatgcaaaggagttcaaaccagagagatttagagaaggaatatcaagtgcaacaaagggtcaactcacatattttccatttagctggggtcctagaatatgtattggacaaaattttgccatgttagaagcaaagatggctctgtctatgatcctgcaacgcttctcttttgaactgtctccgtcttatgcacatgcccctcggtccataataaccgttcagcctcagtatggtgctccacttattttccacaaactataattttggtacttctactaatattttagggtttattcagactcaaaaaaaa

SEQ ID NO: 281 - protein, 513 aa, Nicotiana tabacum
MTVTASCAAIVITLLVCIWRVLNWIWFRPKKLELLLRKQGLEGNSYKVLYGDMKEFSGMIKEAYSKPMSLSDDVAPRLMPFFLETIKKYGKRSFIWFGPRPLVLIMDPELIKEVLSKIHLYQKPGGNPLATLLVQGIATYEEDKWAKHRKIINPAFHLEKLKLMLPAFRLSCSEMLSKWEDIVSADSSHEIDVWSHLEQLTCDVISRTAFGSSYEEGRKIFELQKEQAQYLVEVFRSVYIPGRRFLPTKRNRRMKEIKKDVRASIKGIIDKRLKAMKAGDTNNEDLLGILLESNIKEIEQHGNKDFGMSIEEVIEECKLFYFAGQETTSVLLLWSLVLLSRYQDWQARAREEILQVFGSRKPDFDGLNHLKIVTMILYESLRLYPSLITLTRRCNEDIVLGELSLPAGVLVSLPLILLHHDEEIWGEDAKEFKPERFREGISSATKGQLTYFPFSWGPRICIGQNFAMLEAKMALSMILQRFSFELSPSYAHAPRSIITVQPQYGAPLIFHKL

SEQ ID NO: 282 - DNA, 1671 bp, Nicotiana tabacum
tgcaatatagttttcctagtcagttctagcctccttttccttagaaataatggattatcatatttctttccattttcaagctcttttagggcttttagcctttgtgttcttgtctattatcttatggagaagaacactcacttcaagaaaattagcccctgaaatcccaggggcatggcctattataggccatcttcgtcagctgagtggtactgataagaatatcccatttccccgaatattgggcgctttggcagataaatatggacctgtcttcacactgagaatagggatgtacccctatttgattgtcaacaattgggaagcagctaaggattgtctcacaacgcatgataaggacttggctgcccgaccaacttctatggctggtgaaagcatcgggtacaagtatgcgaggtttacttatgctaattttggtccttattataaccaagtgcgcaaactagccctacaacatgtactctcgagtactaaactcgagaaaatgaaacacatacgtgtttctgaattggaaactagcatcaaagaattatattctttgacgctgggcaaaaacaacatgcaaaaagtgaatataagtaaatggtttgaacaattgactttaaacataatcgtgaagacaatttgtggcaagagatatagcaacatagaggaggatgaagaggcacaacgtttcagaaaggcatttaagggcatcatgtttgttgtagggcaaattgttttatatgacgcaattccattcccattgttcaaatactttgatttccaaggtcatatacaattgatgaacaaaatttataaagacttagattctattcttcaaggatggttggatgatcatatgatgaacaaggatgtaaacaataaggatcaagatgccatagatgccatgcttaaggtaacacaacttaatgaattcaaagcctatggtttttctcaggccactgtgatcaagtcgacagtcttgagtttgatcttagatggaaatgacacaaccgctgttcatttgatatgggtaatgtccttattactgaacaatccacatgttatgaaacaaggccaagaagagatagacatgaaagtgggtaaagagaggtggattgaagatactgacataaaaaatttagtgtaccttcaggctatcgttaaagagacattgcgcttgtatccacctgttccttttcttttaccacacgaagcagtgcaagattgtaaagtgactggttaccacattcctaaaggtactcgtctatatatcaatgcgtggaaagtacatcgcgatcctgaaatttggtcagagcccgaaaagtttatgcccaatagattcttgactagcaaagcaaatatagatgctcgcggtcaaaattttgaatttataccgtttggttctgggagacggtcatgtccagggataggttttgcgactttagtgacacatctgacttttggtcgcttgcttcaaggttttgattttagtaagccatcaaacacgccaattgacatgacagaaggcgtaggcgttactttgcctaaggttaatcaagttgaagttctaattacccctcgtttaccttctaagctttatttattttgaaggtgcaaatcatcaatcatggcttgagtaattagttatactttaatatgtttctc

SEQ ID NO: 283 - protein, 521 aa, Nicotiana tabacum
MDYHISFHFQALLGLLAFVFLSIILWRRTLTSRKLAPEIPGAWPIIGHLRQLSGTDKNIPFPRILGALADKYGPVFTLRIGMYPYLIVNNWEAAKDCLTTHDKDLAARPTSMAGESIGYKYARFTYANFGPYYNQVRKLALQHVLSSTKLEKMKHIRVSELETSIKELYSLTLGKNNMQKVNISKWFEQLTLNIIVKTICGKRYSNIEEDEEAQRFRKAFKGIMFVVGQIVLYDAIPFPLFKYFDFQGHIQLMNKIYKDLDSILQGWLDDHMMNKDVNNKDQDAIDAMLKVTQLNEFKAYGFSQATVIKSTVLSLILDGNDTTAVHLIWVMSLLLNNPHVMKQGQEEIDMKVGKERWIEDTDIKNLVYLQAIVKETLRLYPPVPFLLPHEAVQDCKVTGYHIPKGTRLYINAWKVHRDPEIWSEPEKFMPNRFLTSKANIDARGQNFEFIPFGSGRRSCPGIGFATLVTHLTFGRLLQGFDFSKPSNTPIDMTEGVGVTLPKVNQVEVLITPRLPSKLYLF

SEQ ID NO: 284 - DNA, 1618 bp, Nicotiana tabacum
tttgattcaaccatggagaaccaatactcctactcattctcttcctacttctacttagctatagtactgtttcttcttccaattttggtcaaatatttcttccatcggagaagaaatttacctccaagtccattttctcttccaataattggtcacctttaccttctcaagaaaactctccatctcactctaacatccttatcagctaaatatggtcctgttttatacctcaaattgggctctatgcctgtgattgttgtgtcctcaccatctgctgttgaagaatgtttaaccaagaatgatatcatattcgcaaataggcccaagaccgtggctggtgacaagtttacctacaattatactgtttatgtttgggcaccctatggccaactttggagaattcttcgccgattaactgtcgttgaactcttctcttcacatagcctacagaaaacttctatccttagagatcaagaagttgcaatatttatccgttcgttatacaaattctcaaaggatagtagcaaaaaagtcgatttgaccaactggtcttttactttggttttcaatcttatgaccaaaattattgctgggagacatattgtgaaggaggaagatgctggcaaggaaaagggcattgaaattattgaaaaacttagagggactttcttagtaactacatcattcttgaatatgtgtgatttcttgccagtattcaggtgggttggttacaaagggcaggagaagaagatggcctcaattcacaatagaagaaatgaattcttgaacagcttgcttgatgaatttcgacacaagaaaagtagtgcttcacaatctaacacaactgttggaaacatggagaagaaaaccacactgattgaaaagctcttgtctcttcaagaatcagagcctgaattctacactgatgatatcatcaaaagtattatgctggtagtttttgttgcaggaacagagacctcatcaacaaccatccaatgggtaatgaggcttcttgtagctcaccctgaggcattgtataagctacgagctgacattgacagtaaagttgggaataagcgcttgctgaatgaatcagacctcaacaagcttccgtatttgcattgtgttgttaatgagacaatgagattatacactccgataccacttttattgcctcattattcaactaaagattgtattgtggaaggatatgatgtaccaaaacatacaatgttgtttgtcaacgcttgggccattcacagggatcccaaggtatgggaggagcctgacaagttcaagccagagagatttgaggcaacagaaggggaaacagaaaggttcaattacaagcttgtaccatttggaatggggagaagagcgtgccctggagctgatatggggttgcgagcagtttctttggcattaggtgcacttattcaatgctttgactggcaaattgaggaagcggaaagcttggaggaaagctataattctagaatgactatgcagaacaagcctttgaaggttgtctgcactccacgcgaagatcttggccagcttctatcccaactctaaggcaatttatcaatgccaaacgtaatcttcatctaccactatg

SEQ ID NO: 285 - protein, 520 aa, Nicotiana tabacum
MENQYSYSFSSYFYLAIVLFLLPILVKYFFHRRRNLPPSPFSLPIIGHLYLLKKTLHLTLTSLSAKYGPVLYLKLGSMPVIVVSSPSAVEECLTKNDIIFANRPKTVAGDKFTYNYTVYVWAPYGQLWRILRRLTVVELFSSHSLQKTSILRDQEVAIFIRSLYKFSKDSSKKVDLTNWSFTLVFNLMTKIIAGRHIVKEEDAGKEKGIEIIEKLRGTFLVTTSFLNMCDFLPVFRWVGYKGQEKKMASIHNRRNEFLNSLLDEFRHKKSSASQSNTTVGNMEKKTTLIEKLLSLQESEPEFYTDDIIKSIMLVVFVAGTETSSTTIQWVMRLLVAHPEALYKLRADIDSKVGNKRLLNESDLNKLPYLHCVVNETMRLYTPIPLLLPHYSTKDCIVEGYDVPKHTMLFVNAWAIHRDPKVWEEPDKFKPERFEATEGETERFNYKLVPFGMGRRACPGADMGLRAVSLALGALIQCFDWQIEEAESLEESYNSRMTMQNKPLKVVCTPREDLGQLLSQL

SEQ ID NO: 286 - DNA, 1676 bp, Nicotiana tabacum
cctttttaagatgtatttaagatttaagatttaagatgaagcaactgaggtaagtcctttcaaggagtagttgtcacttctgagaatggagatgatgtacagcataatagcagcagccagtattgcaattatcttggtatatacatggaaagtgttgaattgggcttggtttgggccgaagaaaatggagaaatgcttaagacagaggggtctcaagggaaatccttataagctactctatggagatctaaacgaactgacaaaaagcataatagaagccaagtctaagcccatcaatttctctgatgatattgctcaaaggctcatccctttttttcttgacgccatcaacaaaaatggtaaaaactccttcgtctggcttggaccgtatccaatagtgttgatcacggatcctgagcatttaaaggagattttcacaaagaattatgtgtatcaaaagcaaactcatcccaatccatacgccaagctattagctcacggtcttgtcagccttgaggaagacaaatgggccaaacacagaaaaatcattagtcctgccttccatgtcgagaagctaaagcatatgctgcctgcattttatctgagttgtagtgaaatgataagcaaatgggaggaggttgttccaaaagaaacatcattcgagctcgatgtatggccagaccttcaaataatgaccagtgaagtcatttctcgcactgcatttgggagtagctatgaagaaggaagaatagtatttgaacttcagaaagaacaagctgagtatgtaatggacataggacgttcaatttatataccaggatcaaggttcttgcctactaaaaggaacaaaagaatgctggaaattgaaaagcaagtgcaaacaacaattaggcgtatcatcgacaaaagattgaaggcaatggaagaaggggagactagtaaagatgacttattaggcatattacttgaatccaatttgaaagaaattgaacttcatggaagaaatgacttgggaataacaacgtcagaagtgattgaagagtgcaagttattctattttgccggccaagagaccacttcagtgttgcttgtttggacaatgattttgttgtgcttacatccagagtggcaagtacgtgccagaaaggaagtgttgcagatctttggaaatgataaaccagatttggaaggactaagtcgcttgaaaattgtaacaatgatcttgtacgagacgttacgcctattccccccattaccagcatttggtagaaggaacaaagaagaagtcaaattaggggagctacatctaccggctggagtgttactcgttataccagcaatcttagtacattatgataaggaaatatggggtgaagatgcaaaggaattcaaaccagaaagattcagtgaaggagtgtcaaaggcaacaaatggacaagtctcatttataccatttagctggggacctcgtgtttgcattggacaaaacttcgcaatgatggaagcaaaaatggcagtaactatgatactacaaaaattctcctttgaactatccccttcttatacacatgctccatttgcaattgtgactattcatccccagtatggtgctcctctgcttatgcgcagactttaaaacatatgttgctgatatttaagatcagtggcgttttatt

SEQ ID NO: 287 - protein, 516 aa, Nicotiana tabacum
MEMMYSIIAAASIAIILVYTWKVLNWAWFGPKKMEKCLRQRGLKGNPYKLLYGDLNELTKSIIEAKSKPINFSDDIAQRLIPFFLDAINKNGKNSFVWLGPYPIVLITDPEHLKEIFTKNYVYQKQTHPNPYAKLLAHGLVSLEEDKWAKHRKIISPAFHVEKLKHMLPAFYLSCSEMISKWEEVVPKETSFELDVWPDLQIMTSEVISRTAFGSSYEEGRIVFELQKEQAEYVMDIGRSIYIPGSRFLPTKRNKRMLEIEKQVQTTIRRIIDKRLKAMEEGETSKDDLLGILLESNLKEIELHGRNDLGITTSEVIEECKLFYFAGQETTSVLLVWTMILLCLHPEWQVRARKEVLQIFGNDKPDLEGLSRLKIVTMILYETLRLFPPLPAFGRRNKEEVKLGELHLPAGVLLVIPAILVHYDKEIWGEDAKEFKPERFSEGVSKATNGQVSFIPFSWGPRVCIGQNFAMMEAKMAVTMILQKFSFELSPSYTHAPFAIVTIHPQYGAPLLMRRL

SEQ ID NO: 288 - DNA, 1577 bp, Nicotiana tabacum
ctaaatttcatatacctttagtactcttgaaattttcaaataatggtttatcttctttctcccatagaagccattgtaggatttgtaaccttttcatttctattctactttctatggaccaaaaaacaatcaaaaatcttaaacccactacctccaaaaatcccaggtggatggccagtaatcggccatctcttttatttcaagaacaatggcgatgaagatcgccatttttctcaaaaactcggtgacttagctgacaaatatggtcccgtcttcactttccggttagggtttcgccgtttcttggcggtgagtagttatgaagctatgaaagaatgcttcactaccaatgatatccatttcgccgatcggccatctttactctacggagaatacctttgctataataatgccatgcttgctgttgccaaatatggcccttactggaaaaaaaatcgaaagttagtcaatcaagaagttctctccgttagtcggctcgaaaaattcaaacatgttagattttctataattcagaaaaatattaaacaattgtataattgtgattcaccaatggtgaagataaaccttagtgattggatagataaattgacattcgacatcattttgaaaatggttgttgggaagaactataataatggacatggagaaatactcaaagttgcttttcagaaattcatggttcaagctatggagatggagctctatgatgtttttcacattccatttttcaagtggttggatcttacagggaatattaaggctatgaaacaaactttcaaagacattgataatattatccaaggttggttagatgagcacattaagaagagagaaacaaaggatgttggaggtgaaaacgaacaagattttatagatgtggtgctttccaagatgagcgacgaacatcttggcgagggttactctcatgacacaaccatcaaagcaactgtattcactttggtcttggatgcaacagacacacttgcacttcatataaagtgggtaatggcgttaatgataaacaataagcatgtcatgaagaaagcacaagaagagatggacacaattgttggtagagatagatgggtagaagagagtgatatcaagaatttggtgtatctccaagcaattgttaaagaagtattacgattacatccacctgcacctttgtcagtgcaacacctatctgtggaagattgtgttgtcaatgggtaccatattcctaaggggactgcactacttaccaatattatgaaactacagcgagatcctcaaacatggccaaatcctgataaattcgatccagagagattcctgacgactcatgctactattgactaccgcgggcagcactatgagttgatcccctttggtacggggagacgagcttgtcccgcgatgaattattcattgcaagtggaacacctttcaattgctcatatgatccaaggtttcagttttgcaactacgaccaatgagcctttggatatgaaacaaggtgtgggtttaactttaccaaagaagactgatgttgaagttctaattacccctcgttt

SEQ ID NO: 289 - protein, 511 aa, Nicotiana tabacum
MVYLLSPIEAIVGFVTFSFLFYFLWTKKQSKILNPLPPKIPGGWPVIGHLFYFKNNGDEDRHFSQKLGDLADKYGPVFTFRLGFRRFLAVSSYEAMKECFTTNDIHFADRPSLLYGEYLCYNNAMLAVAKYGPYWKKNRKLVNQEVLSVSRLEKFKHVRFSIIQKNIKQLYNCDSPMVKINLSDWIDKLTFDIILKMVVGKNYNNGHGEILKVAFQKFMVQAMEMELYDVFHIPFFKWLDLTGNIKAMKQTFKDIDNIIQGWLDEHIKKRETKDVGGENEQDFIDVVLSKMSDEHLGEGYSHDTTIKATVFTLVLDATDTLALHIKWVMALMINNKHVMKKAQEEMDTIVGRDRWVEESDIKNLVYLQAIVKEVLRLHPPAPLSVQHLSVEDCVVNGYHIPKGTALLTNIMKLQRDPQTWPNPDKFDPERFLTTHATIDYRGQHYELIPFGTGRRACPAMNYSLQVEHLSIAHMIQGFSFATTTNEPLDMKQGVGLTLPKKTDVEVLITPR

SEQ ID NO: 290 - DNA, 1434 bp, Nicotiana tabacum
  misc_feature (564)..(564): n is a, c, g, or t
ctttttctccccaaaaaagagctcatttcccttgtccccaaaaatggatcttctcttactagagaagaccttaattggtctcttctttgccattttaatcgctgtaattgtctctagacttcgttcaaagcgttttaagcttcccccaggaccaatcccagtaccagtttttggtaattggcttcaagttggtgatgatttaaaccacagaaatcttactgattttgccaaaaaatttggtgatcttttcttgttaagaatgggccagcgtaatttagttgttgtgtcatctcctgaattagctaaagaagttttacacacacaaggtgttgaatttggttcaagaacaagaaatgttgtatttgatatttttactggaaaaggtcaagatatggtttttactgtatatggtgaacactggagaaaaatgaggagaattatgactgtaccattttttactaataaagttgtgcagcaatatagaggggggtgggagtttgaagtggcaagtgtaattgaggatgtgaagaaaaatcctgaatctgctactaatgggattgtatnaaggaggagattacaattgatgatgtataataatatgtttaggattatgtttgataggagatttgagagtgaagatgatcctttgtttgttaagcttaaggctttgaatggtgaaaggagtagattggctcagagttttgagtataattatggtgattttattcccattttgaggccttttttgagaggttatttgaagatctgtaaagaagttaaggagaagaggctgcagcttttcaaagattactttgttgatgaaagaaagaagctttcaaataccaagagcttggacagcaatgctctgaaatgtgcgattgatcacattcttgaggctcaacagaagggggagatcaatgaggacaacgttctttacattgttgaaaacatcaatgttgctgctatagaaaccacattatggtcaattgagtggggtatcgccgagttagtcaaccaccctcacatccaaaagaaactccgcgacgagattgacacagttcttggcccaggagtgcaagtgactgaaccagacacccacaagcttccataccttcaggctgtgatcaaggagacgcttcgtctccgtatggcaattcctctattagtcccacacatgaaccttcacgatgcaaagcttggcgggtttgatattccagcagagagcaaaatcttggttaacgcttggtggctagctaacaacccggctcattggaagaaacccgaagagttcagacccgagaggttcttcgaagaggagaagcacgttgaggccaatggcaatgacttcagatatcttccgtttggcgttggtaggaggagttgccctggaactatacttgcattgccaattcttggcattactttgggacgttt

SEQ ID NO: 291 - protein, 463 aa, Nicotiana tabacum
MDLLLLEKTLIGLFFAILIAVIVSRLRSKRFKLPPGPIPVPVFGNWLQVGDDLNHRNLTDFAKKFGDLFLLRMGQRNLVVVSSPELAKEVLHTQGVEFGSRTRNVVFDIFTGKGQDMVFTVYGEHWRKMRRIMTVPFFTNKVVQQYRGGWEFEVASVIEDVKKNPESATNGIVLRRRLQLMMYNNMFRIMFDRRFESEDDPLFVKLKALNGERSRLAQSFEYNYGDFIPILRPFLRGYLKICKEVKEKRLQLFKDYFVDERKKLSNTKSLDSNALKCAIDHILEAQQKGEINEDNVLYIVENINVAAIETTLWSIEWGIAELVNHPHIQKKLRDEIDTVLGPGVQVTEPDTHKLPYLQAVIKETLRLRMAIPLLVPHMNLHDAKLGGFDIPAESKILVNAWWLANNPAHWKKPEEFRPERFFEEEKHVEANGNDFRYLPFGVGRRSCPGTILALPILGITLGR

SEQ ID NO: 292 - DNA, 1723 bp, Nicotiana tabacum
ccaaattagagcaagaaattaacaagtctagttaccttctccctttttaagagtatttaagatttaagatttaagatgaagcaactgaggtaagtcctttcaaggagtagttgtcacttctgagaatggagatgatgtacagcataatagcagcagccagtattgcaattatcttggtatatacatggaaagtgttgaattgggcttggtttgggccaaagaaaatggagaaatgcttaagacagaggggtctcaagggaaatccttataagctactctatggagatctaaacgaactgacaaaaagcataatagaagccaagtctaagcccatcaatttctctgatgatattgctcaaaggctcatccctttttttcttgacgccatcaacaaaaatggtaaaaactccttcgtctggcttggaccgtatccaatagtgttgatcacggatcctgagcatttaaaggagattttcacaaagaattatgtgtatcaaaagcaaactcatcccaatccatacgccaagctattagctcacggtcttgtcagccttgaggaagacaaatgggccaaacacagaaaaatcattagtcctgccttccatgtcgagaagctaaagcatatgctgcctgcattttatctgagttgtagtgaaatgataagcaaatgggaggaggttgttccaaaagaaacatcattcgagctcgatgtatggccagaccttcaaataatgaccagtgaagtcatttctcgcactgcatttgggagtagctatgaagaaggaagaatagtatttgaacttcagaaagaacaagctgagtatgtaatggacataggacgttcaatttatataccaggatcaaggttcttgcctactaaaaggaacaaaagaatgctggaaattgaaaagcaagtgcaaacaacaattaggcgtatcatcgacaaaagattgaaggcaatggaagaaggggagactagtaaagatgacttattaggcatattacttgaatccaatttgaaagaaattgaacttcatggaagaaatgacttgggaataacaacatcagaagtgattgaagagtgcaagttaatctattttgccggccaagagaccacttcagtgttgcttgtttggacaatgattttgttgtgcttacatccagagtggcaagtacgtgccagaaaggaagtgttgcagacctttggaaatgataaaccagatttggaaggactaagtcgcttgaaaattgtaacaatgatcttgtacgagacgttacgcctattccccccattaccagcatttggtagaaggaacaaagaagaagtcaaattaggggagctacatctaccggctggagtgttactcgttataccagcaatcttagtacattatgataaggaaatatggggtgaagatgcaaaggaattcaaaccagaaagattcagtgaaggagtgtcaaaggcaacaaatggacaagtctcatttataccatttagctagggacctcgtgtttgcattggacaaaacttcgcaatgatggaagcaaaaatggcagtaactatgatactacaaaaattctcctttgaactatccccttcttatacacatgctccatttgcaattgtgactattcatccccagtatggtgctcctctgcttatgcgcagactttaaaacatatgttgctgatatttaagatcagtggcgttttattctccatg

SEQ ID NO: 293 - protein, 458 aa, Nicotiana tabacum
MEMMYSIIAAASIAIILVYTWKVLNWAWFGPKKMEKCLRQRGLKGNPYKLLYGDLNELTKSIIEAKSKPINFSDDIAQRLIPFFLDAINKNGKNSFVWLGPYPIVLITDPEHLKEIFTKNYVYQKQTHPNPYAKLLAHGLVSLEEDKWAKHRKIISPAFHVEKLKHMLPAFYLSCSEMISKWEEVVPKETSFELDVWPDLQIMTSEVISRTAFGSSYEEGRIVFELQKEQAEYVMDIGRSIYIPGSRFLPTKRNKRMLEIEKQVQTTIRRIIDKRLKAMEEGETSKDDLLGILLESNLKEIELHGRNDLGITTSEVIEECKLIYFAGQETTSVLLVWTMILLCLHPEWQVRARKEVLQTFGNDKPDLEGLSRLKIVTMILYETLRLFPPLPAFGRRNKEEVKLGELHLPAGVLLVIPAILVHYDKEIWGEDAKEFKPERFSEGVSKATNGQVSFIPFS

SEQ ID NO: 294 - DNA, 1717 bp, Nicotiana tabacum
tttgcctttgctcgtcattgatgacgacttcattttgttttcttccccacgaaaatggtagatatgatatggagggacgtagggaagaattactgggacaaacctagtgagtgaaaatggaaacagttgaaatgatagtaaaagtatcttgtgctgccatagtaattactctgttggtgtgtctatggagagtgctgaattgggtttggttcagaccaaagaaattagagaagttgttgagaaaacaggttttgtatggggacatgaaagagttttctgggatgattaaggaagcatactcaaagcctatgagtctgtctgatgatgtagcaccacgaatgatgcctttctttcttgaaaccatcaagaaatatggaaaaagatcctttatatggttcggtccaagaccactagtattgatcatggatcctgagcttataaaggaagtactctccaaaatctatctttatcaaaagcccggtggaaatccattagcaacactattggtacaaggattagcaacctatgaggaagacaaatgggccaaacatagaaaaatcatcaatcccgctttccatctagagaagctaaagcatatgcttccagcttttcgcttgagctgtagtgagatgctgagcaaatgggaagacattgtttcagctgaaggctcacatgagatagatgtatggcctaaccttgagcaattgagttgcgatgtgatctctcggacagcttttggcaatagttatgaagaaggtagaaagatttttgaacttcaaaaggaacaaactcagcatcttgtggaagctttccgctctgtttatatcccaggaaggagatttttgccaacaaagaggaatagaagaatgaaggaaataaaaaaggaggttcgagcgtcaattaaaggtattattgataaaagattgaaggcaatgaaagcaggggacaccaataatgaggatctattgggatattgctggaatcaaattttaaagaaattgaacagcgcggaaacaaggattttggaatgagcattgaagatgtcattgaagaatgcaagttattctattttgctggccaagaaactacatcagtgttgctcctatggtctctagtgtcgttgagcaggtatcaagattggcagacacgggccagagaagaagtcttgcatgtctttgggagtcggaaaccagattttgatgaattaaatcatctaaaagttgtgacaatgatcatgtacgagtctttaaggctatatccctcactaataacacttacccgccggtgtaatgaagacattgtattaggagaactatctctaccagctggtgtcctagtctctttgccaatgattttgttgcatcatgatgaagagatatggggtgaagatgcaaaggagttcaaaccagagagatttagagaaggattgtcaagtgcaacaaagggtcaacttacatattttccatttggctggggtcctagaatatgtattggacaaaattttgccatgttagaagcaaagatggctctgtctatgatcctgcaacgcttctcttttgaactgtctccgtcttatgcacatgcccctcagtccatattaaccgttcagcctcaatatggtgctccacttattttccacaagctataatttggtacttgtgaaaggtgtcttgtacaatatgttagtagagtttattcagacttagatacatgcttc

SEQ ID NO: 295 - protein, 304 aa, Nicotiana tabacum
METVEMIVKVSCAAIVITLLVCLWRVLNWVWFRPKKLEKLLRKQVLYGDMKEFSGMIKEAYSKPMSLSDDVAPRMMPFFLETIKKYGKRSFIWFGPRPLVLIMDPELIKEVLSKIYLYQKPGGNPLATLLVQGLATYEEDKWAKHRKIINPAFHLEKLKHMLPAFRLSCSEMLSKWEDIVSAEGSHEIDVWPNLEQLSCDVISRTAFGNSYEEGRKIFELQKEQTQHLVEAFRSVYIPGRRFLPTKRNRRMKEIKKEVRASIKGIIDKRLKAMKAGDTNNEDLLGYCWNQILKKLNSAETRILE

SEQ ID NO: 296 - DNA, 1559 bp, Nicotiana tabacum
ccaaaatgcagttcttcaacttcatttcctttgtcttttttgtgtctttcctctttttattaaggaaatggaagaactccaatagccaaaccaaaagattgcctccaggtccatggaaattacctgtacttggaagcatgtttcatttgctaggtggacctccacatcatgtccttggagatttagccaaaaaatatggtccacttatgcaccttcaactaggtgaagtttctgtagtttctgttacttctcctgagatggcaaaagaagtactaaaaactcatgacctcgcttttgcatctaggccgttacttttggcagccaaaattgtctgctataatgggacagacattgtcttttccccctatggcgattattggagacaaacgcgtaaaatttgtctcttggaattgctcagtgccaaaaatgttaggtcattcagctcagtcagacgagatgaagttttccatatgattgaatttttttcgatcatcttctggtaagccagttaatgtatcaaaaaggatttctctattcacaacctctatgacatgtagatcagcctttggacaagaatacaaggagcaagacgaattcgcacaactagtaaaaaaagtgtcaagcttaatggaagggtttgatgttgctgatatattcccttcattgaagtttcttcatgtgctcagtggaatgaaggctaaagttatggatgcacaccatgagttagatgccattcttgaaaaaattatcaatgagcacaagaaaattgcaactggaaagaataataatgaattaggaggtgaaggattaattgacgtactgctaagacttatgaaagagggaggccttcaattcccgatcaccaacgacaacatcaaagctattatttttgacatgtttggtgcgggaacggaaacttcatcaaccacaattgactgggccatggtcgaaatgataaagaatccaagtgtattcgctaaagctcaagcagaggtaagagaagccttcagagagaaagaaacttttgatgaaaatgatgtcgaggagttgaaatacttaaaattggttatcaaagaaactttcagactccatcctccatttccccttttgctcccaagagaatctagagaagaaacagatataaacggctacactattccttttaaaacaaaacttatggttaacgttcgggctattggaagagatccaaaatattgggatgacgtggaaagttttaagccagagagatttgagcacaactctatggattttattggtaataattttgaatatcttccctttggtagtggaaggagaatgtgccctgggatatcatttggtttggctaatgtttatttgccactagctcaattgttatatcattttgattggaaactccctactggaatcaattcaagtgacttggacatgactgagtcgtcaggagtaacttgtgctagaaagagtgatttatacttgactgctactccatatcaactttctcaagagtgatgcaatgatatcaaccttttgaatttcggtcaaccccaccaatagtg

SEQ ID NO: 297 - protein, 165 aa, Nicotiana tabacum
MQFFNFISFVFFVSFLFLLRKWKNSNSQTKRLPPGPWKLPVLGSMFHLLGGPPHHVLGDLAKKYGPLMHLQLGEVSVVSVTSPEMAKEVLKTHDLAFASRPLLLAAKIVCYNGTDIVFSPYGDYWRQTRKICLLELLSAKNVRSFSSVRRDEVFHMIEFFSIIFW

SEQ ID NO: 298 - DNA, 1601 bp, Nicotiana tabacum
ccccaccaaaaaatcatttctctcgtctaaaatggatcttctcttactagagaagaccttaattggtcttttctttgccattttaatcgctttaattgtctctaaacttcgttcaaagcgttttaagcttcctccaggaccaattccagtaccagtttttggtaattggcttcaagttggtgatgatttaaaccacagaaatcttactgattatgccaagaaatttggagatcttttcttgttaagaatgggtcaacgtaacttagttgttgtgtcatctcctgaattagctaaagaagttttacacacacaaggtgttgaatttggttcaagaacaagaaatgttgtgtttgatatttttactggaaaaggtcaagatatggtttttactgtatatggtgaacattggagaaaaatgaggagaattatgactgtaccattttttactaataaagttgtgcaacagtatagaggggggtgggagtttgaggtggcaagtgtaattgaggatgtgaaaaaaaatcctgaatctgctactaatgggatcgtattaaggaggagattacaattaatgatgtataataatatgtttaggattatgtttgataggagatttgagagtgaagatgatcctttgtttgttaagcttaaggctttgaatggtgaaaggagtagattggctcaaagttttgagtataattatggtgattttattccaattttgaggcctttttttgagaggttatttgaagatctgtaaagaagttaaggagaagaggctgcagcttttcaaagattactttgttgatgaaagaaagaagctttcgaataccaagagctcggacagcaatgccctaaaatgtgcgattgatcacattcttgaggctcaacagaagggagagatcaatgaggacaacgttctttacattgttgaaaacatcaatgttgctgcaattgaaacaacattatggtcaattgagtggggtatcgccgagctagtcaaccaccctcacatccaaaagaaactgcgcgacgagattgacacagttcttggaccaggagtgcaagtgactgaaccagacacccacaagcttccataccttcaggctgtgatcaaggaggcacttcgtctccgtatggcaattcctctattagtcccacacatgaaccttcacgacgcaaagcttggcgggtttgatattccagcagagagcaaaatcttggttaacgcttggtggttagctaacaacccggctcattggaagaaacccgaagagttcagacccgagaggttctttgaagaggagaagcatgttgaggccaatggcaatgacttcagatatcttccgtttggcgttggtaggaggagctgccctggaattatacttgcattgccaactcttggcatcactttgggacgtttggttcagaactttgagctgttgcctcctccaggccagtcgaagctcgacaccacagagaaaggtggacagttcagtctccacattttgaagcattccaccattgtgttgaaaccaaggtctttctgaactttgtgatcttattaattaaggggttctgaagaaatttgatagtgttgg

SEQ ID NO: 299 - protein, 242 aa, Nicotiana tabacum
MDLLLLEKTLIGLFFAILIALIVSKLRSKRFKLPPGPIPVPVFGNWLQVGDDLNHRNLTDYAKKFGDLFLLRMGQRNLVVVSSPELAKEVLHTQGVEFGSRTRNVVFDIFTGKGQDMVFTVYGEHWRKMRRIMTVPFFTNKVVQQYRGGWEFEVASVIEDVKKNPESATNGIVLRRRLQLMMYNNMFRIMFDRRFESEDDPLFVKLKALNGERSRLAQSFEYNYGDFIPILRPFFERLFEDL

SEQ ID NO: 300 - DNA, 1544 bp, Nicotiana tabacum; identical to SEQ ID NO: 266

SEQ ID NO: 301 - protein, 223 aa, Nicotiana tabacum; identical to SEQ ID NO: 267

SEQ ID NO: 302 - DNA, 1765 bp, Nicotiana tabacum
gtgaggtttgaatcctctgcctcaatgaaactcaccaaattggttttctaatttccatctaaaatattgtccaaagctaaagattctttctccttaaatagtcaactttagtggttcctcttcatttcatagctcaatctttcttattttgattcaaccatggagaaccaatactcctactcattctcttcctacttctacttagctatagtactgtttcttcttccaattttggtcaaatatttcttccatcggagaagaaatttacctccaagtccattttctcttccaataattggtcacctttaccttctcaagaaaactctccatctcactctaacatccttatcagctaaatatggtcctgttttatacctcaaattgggctctatgcctgtgattgttgtgtcctcaccatctgctgttgaagaatgtttaaccaagaatgatatcatattcgcaaataggcccaagaccgtggctggtgacaagtttacctacaattatactgtttatgtttgggcaccctatggccaactttggagaattcttcgccgattaactgtcgttgaactcttctcttcacatagcctacagaaaacttctatccttagagatcaagaagttgcaatatttatccgttcgttatacaaattctcaaaggatagtagcaaaaaagtcgatttgaccaactggtcttttactttggttttcaatcttatgaccaaaattattgctgggagacatattgtgaaggaggaagatgctggcaaggaaaagggcattgaaattattgaaaaacttagagggactttcttagtaactacatcattcttgaatatgtgtgatttcttgccagtattcaggtgggttggttacaaagggctggagaagaagatggcctcaattcacaatagaagaaatgaattcttgaacagcttgcttgatgaatttcgacacaagaaaagtagtgcttcacaatctaacacaactgttggaaacatggagaagaaaaccacactgattgaaaagctcttgtctcttcaagaatcagagcctgaattctacactgatgatatcatcaaaagtattatgctggtagtttttgttgcaggaacagagacctcatcaacaaccatccaatgggtaatgaggcttcttgtagctcaccctgaggcattgtataagctacgagctgacattgacagtaaagttgggaataagcgcttgctgaatgaatcagacctcaacaagcttccgtatttgcattgtgttgttaatgagacaatgagattatacactccgataccacttttattgcctcattattcaactaaagattgtattgtggaaggatatgatgtaccaaaacatacaatgttgtttgtcaacgcttgggccattcacagggatcccaaggtatgggaggagcctgacaagttcaagccagagagatttgaggcaacagaaggggaaacagaaaggttcaattacaagcttgtaccatttggaatggggagaagagcgtgccctggagctgatatggggttgcgagcagtttctttggcattaggtgcacttattcaatgctttgactggcaaattgaggaagcggaaagcttggaggaaagctataattctagaatgactatgcagaacaagcctttgaaggttgtctgcactccacgcgaagatcttggccagcttctatcccaactctaaggcaatttatcaatgccaaacgtaatcttcatctaccactatg

SEQ ID NO: 303 - protein, 520 aa, Nicotiana tabacum; identical to SEQ ID NO: 211

SEQ ID NO: 304 - DNA, 1694 bp, Nicotiana tabacum
aacatcctttccttcttccaaaaatggagcttcaatcttctcctttcaatttaatttctttgttcctcttcttttcttttctttttattctagtgaagaaatggaatgccaaaatcccaaagttacctccaggtccgtggaggcttccctttattggaagcctccatcacttgaagggaaaacttccacaccataatcttagagatctagcgcgaaaatatggacctctcatgtacttacaactcggagaaattcctgtagttgtaatatcttcgccacgtgtagcaaaagctgtactaaaaactcatgatctcgcttttgcaactagaccacgattcatgtcctcagacattgtgttttacaaaagcagggacatctcttttgccccatttggtgattactggagacagatgcgtaaaatattgactcaggaactcctgagcaacaagatgctcaagtcatatagcttaatccgaaaggatgagctctcgaagctcctctcatcgattcgtttggaaacaggttctgcagtgaacataaatgaaaagcttctctggtttacgagctgcatgacctgtagattagcctttggaaaaatatgcaatgatcgggatgagttgatcatgctaattagggagatattaacattatcaggaggatttgatgtgggtgatttgttcccttcctggaaattacttcataatatgagcaacatgaaagctaggttgacgaatgtacaccacaagtatgatttagttatggagaacatcatcaatgagcaccaagagaatcatgcagcagggataaagggtaacaacgagtttggtggcgaagatatgatcgatgctctactgagggctaaggagaataatgagcttcaatttcctatcgaaaatgacaacatgaaagcagtaattctggacttgtttattgctggaactgaaacttcatatactgcaattatatgggcactatcagaattgatgaagcacccaagtgtgatggccaaggcacaagctgaagtgagaaaagtcttcaaagaaaatgaaaatttcgacgaaaatgatcttgacaagttgccatacctaaaatcagtgattaaagaaacactaaggatgcaccctccagttcctttgttagggcctagagaatgcagggaccaaacagagatcgatggctacactgtacctattaaagctagagttatggttaatgcttgggcgataggaagagatcctgaaagttgggaagatcctgaaagtttcaaaccggagcgatttgaaaatacttctgttgatcttacaggaaatcactatcagttcattcctttcggttcaggaagaagaatgtgtccaggaatgtcgtttggtttagttaacacagggcatcctttagcccagttgctctattgctttgactggaaactccctgacaaggttaatgcaaatgattttcgcactactgaaacaagtagagtttttgcagcaagcaaagatgacctctacttgattcccacaaatcacagggagcaagaatagcttaatttaatggagttcttggaagaattaaagaagaagggctatataggtgagattttttgtatggttgcaaggtttttagttcatacaataagacaatacattatattccagtattgtgtatcatgtataataaggttccttttgtttaaaaaa

SEQ ID NO: 305 - protein, 504 aa, Nicotiana tabacum; identical to SEQ ID NO: 169

SEQ ID NO: 306 - DNA, 1819 bp, Nicotiana tabacum
caatcagtggatgcgggagtaatatataatatgcaagttgtagaaagagaaaaaaaaaatcaagtagctattctatactggggcacaaatagtgagtgaaaatggagactgttcaaatcataataacagcatcttgtgctgccataataattactctagtggtgtgtatttggagagtactgaattgggtttggttcagaccaaagaagctggaaaaactattgaggaaacaaggtctcaaaggcaactcctacaagattttgtatggggatatgaaggagctttctggtatgattaaggaagctaattccaaacccatgaatctttctgatgatattgcaccaagattggtgcctttctttcttgacaccatcaagaaatatggtaaaaaatcctttgtatggttaggtccgaaaccactggttcttatcatggaccctgagcttataaaggaaatattttccaaatactatctgtatcaaaagcctcatggaaatccagttaccaagctattagtacaaggactagtaagcctagaggaagacaaatgggccaaacatagaaaaatcatcaatccagctttccatctagagaagctaaagcatatgcttccagctttttgcttgagctgcactgagatgctgtgcaaatgggaagatattgtttcaattaagggctcacatgagatagatgtatggcctcaccttgaacaattaagtagcgatgtgatctctcggacagcttttggcagtaactttgaagaaggtaaaaggatatttgaacttcagaaggaacaagctcagtattttgtagaagctatacgctcggtttatataccaggctggaggtttttgccaacaaagaggaacagaagaatgaaggaagttgaaaaggatgttcgggcctcgataagaggcattattgataaaagagtgaaggcaatgaaagcaggagaggcgagtaatgaggatctacttggtatattgttggaatctaattttacagaagctgaacagcatagacacaaggattctgcgatgagcattgaagaagtcattcaagaatgcaagttattctatgttgctggccaagaaactacatcagtgttgcttgtgtggactctaatattgttgagtaggcatcaagattggcagagccgagccagagaagaggtgtttcaagtctttggtaatcagaaaccagattttgacggattgaatcgtctaaaagttgtgacaatgatcttgtatgagtctttaaggctatactccccagtagtgtcactaatccggcggcctaatgaggatgctatattaggaaatgtatctctgccagaaggtgtgctactctcattaccagtgatcttattacaccacgatgaagagatatggggtaaagatgcaaagaagttcaatccagaaagatttagagatggagtctcaagtgcaacaaagggtcaagtcactttttttccatttacttggggtcccagaatatgcatcggacaaaattttgccatgttagaagcaaagactgctttggctatgatcctacaacgcttctcattcgaactgtctccatcttatgcacatgctcctcagtccatattaactatgcaaccccaacatggtgctccactaattctgcacaaaatatagtttgttactttaagcagtgtcttgttatatgtcagagagtccaaaatgtttaattaaggcttgtagaactgccaaatggaacttcatttgcattcgtgggttgtagattgttgtaattggacaagtatactgtttattttagagttttaagaaaaaaaaaa

SEQ ID NO: 307 - protein, 518 aa, Nicotiana tabacum
METVQIIITASCAAIIITLVVCIWRVLNWVWFRPKKLEKLLRKQGLKGNSYKILYGDMKELSGMIKEANSKPMNLSDDIAPRLVPFFLDTIKKYGKKSFVWLGPKPLVLIMDPELIKEIFSKYYLYQKPHGNPVTKLLVQGLVSLEEDKWAKHRKIINPAFHLEKLKHMLPAFCLSCTEMLCKWEDIVSIKGSHEIDVWPHLEQLSSDVISRTAFGSNFEEGKRIFELQKEQAQYFVEAIRSVYIPGWRFLPTKRNRRMKEVEKDVRASIRGIIDKRVKAMKAGEASNEDLLGILLESNFTEAEQHRHKDSAMSIEEVIQECKLFYVAGQETTSVLLVWTLILLSRHQDWQSRAREEVFQVFGNQKPDFDGLNRLKVVTMILYESLRLYSPVVSLIRRPNEDAILGNVSLPEGVLLSLPVILLHHDEEIWGKDAKKFNPERFRDGVSSATKGQVTFFPFTWGPRICIGQNFAMLEAKTALAMILQRFSFELSPSYAHAPQSILTMQPQHGAPLILHKI

SEQ ID NO: 308-366 - skipped (59 entries)

SEQ ID NO: 367 - DNA, 1573 bp, Nicotiana tabacum
atgctttctcccatagaagccattgtaggactagtaaccttcacatttctcttcttcttcctatggacaaaaaaatctcaaaaaccttcaaaacccttaccaccgaaaatccccggaggatggccggtaatcggccatcttttccacttcaatgacgacggcgacgaccgtccattagctcgaaaactcggagacttagctgacaaatacggccccgttttcacttttcggctaggccttccccttgtcttagttgtaagcagttacgaagctgtaaaagactgtttctctacaaatgacgccattttttccaatcgtccagcttttctttacggcgattaccttggctacaataatgccatgctatttttggccaattacggaccttactggcgaaaaaatcgaaaattagttattcaggaagttctctccgctagtcgtctcgaaaaattcaaacacgtgagatttgcaagaattcaagcgagcattaagaatttatatactcgaattgatggaaattcgagtacgataaatttaactgattggttagaagaattgaattttggtctgatcgtgaagatgatcgctgaaaaaaattatgaatccggtaaaggagatgaacaattggagagatttaagaaagcgtttaaggattttatgattttatcaatggagtttgtgttatgggatgcatttccaattccattatttaaatgggtggattttcaagggcatgttaaggctatgaaaaggacttttaaagatatagattctgtttttcagaattggttagaggaacatattaataaaagagaaaaaatggaggttaatgcagaagggaatgaacaagatttcattgatgtggtgctttcaaaaatgagtaatgaatatcttggtgaaggttactctcgtgatactgtcattaaagcaacggtgtttagtttggtcttggatgcagcagacacagttgctcttcacataaattggggaatggcattattgataaacaatcaaaaggccttgacgaaagcacaagaagagatagacacaaaagttggtaaggacagatgggtagaagagagtgatattaaggatttggtatacctccaagctattgttaaagaagtgttacgattatatccaccaggacctttgttagtaccacacgaaaatgtagaagattgtgttgttagtggatatcacattcctaaagggacaagattattcgcaaacgtcatgaaactgcaacgtgatcctaaactctggtctgatcctgatactttcgatccagagagattcattgctactgatattgactttcgtggtcagtactataagtatatcccgtttggttctggaagacgatcttgtccagggatgacttatgcattgcaagtggaacacttaacaatggcacatttgatccaaggtttcaattacagaactccaaatgacgagcccttggatatgaaggaaggtgcaggcataactatacgtaaggtaaatcctgtggaactgataatagcgcctcgcctggcacctgagctttattaaaacctaagatcatcttgct

SEQ ID NO: 368 - protein, 517 aa, Nicotiana tabacum
MLSPIEAIVGLVTFTFLFFFLWTKKSQKPSKPLPPKIPGGWPVIGHLFHFNDDGDDRPLARKLGDLADKYGPVFTFRLGLPLVLVVSSYEAVKDCFSTNDAIFSNRPAFLYGDYLGYNNAMLFLANYGPYWRKNRKLVIQEVLSASRLEKFKHVRFARIQASIKNLYTRIDGNSSTINLTDWLEELNFGLIVKMIAEKNYESGKGDEQLERFKKAFKDFMILSMEFVLWDAFPIPLFKWVDFQGHVKAMKRTFKDIDSVFQNWLEEHINKREKMEVNAEGNEQDFIDVVLSKMSNEYLGEGYSRDTVIKATVFSLVLDAADTVALHINWGMALLINNQKALTKAQEEIDTKVGKDRWVEESDIKDLVYLQAIVKEVLRLYPPGPLLVPHENVEDCVVSGYHIPKGTRLFANVMKLQRDPKLWSDPDTFDPERFIATDIDFRGQYYKYIPFGSGRRSCPGMTYALQVEHLTMAHLIQGFNYRTPNDEPLDMKEGAGITIRKVNPVELIIAPRLAPELY

SEQ ID NO: 369 - DNA, 1573 bp, Nicotiana tabacum
atgctttctcccatagaagccattgtaggactagtaaccttcacatttctcttcttcttcctatggacaaaaaaatctcaaaaaccttcaaaacccttaccaccgaaaatccccggaggatggccggtaatcggccatcttttccacttcaatgacgacggcgacgaccgtccattagctcgaaaactcggagacttagctgacaaatacggccccgttttcacttttcggctaggccttccccttgtcttagttgtaagcagttacgaagctgtaaaagactgtttctctacaaatgacgccattttttccaatcgtccagcttttctttacggcaattaccttggctacaataatgccatgctatttttggccaattacggaccttactggcgaaaaaatcgaaaattagttattcaggaagttctctccgctagtcgtctcgaaaaattcaaacacgtgagatttgcaagaattcaagcgagcattaagaatttatatactcgaattgatggaaattcgagtacgataaatttaactgattggttagaagaattgaattttggtctgatcgtgaagatgatcgctggaaaaaattatgaatccggtaaaggagatgaacaagtggagagatttaagaaagcgtttaaggatcttatgattttatcaatggagtttgtgttatgggatgcatttccaattccattatttaaatgggtggattttcaagggcatgttaaggctatgaaaaggacttttaaagatatagattctgtttttcagaattggttagaggaacatattaataaaagagaaaaaatggaggttaatgcagaagggaatgaacaagatttcattgatgtggtgctttcaaaaatgagtaatgaatatcttggtgaaggttactctcgtgatactgtcattaaagcaacggtgtttagtttggtcttggatgcagcagacacagttgctcttcacataaattggggaatggcattattgataaacaatcaaaaggccttgacgaaagcacaagaagagatagacacaaaagttggtaaggacagatgggtagaagagagtgatattaaggatttggtatacctccaagctattgttaaagaagtgttacgattatatccaccaggacctttgttagtaccacacgaaaatgtagaagattgtgttgttaggggatatcacattcctaaagggacaagattattcgcaaacgtcatgaaactgcaacgtgatcctaaactctggtctgatcctgatactttcgatccagagagattcattgctactgatattgactttcgtggtcagtactataagtatatcccgtttggttctggaagacgatcttgtccagggatgacttatgcattgcaagtggaacacttaacaatggcacatttgatccaaggtttcaattacagaactccaaatgacgagcccttggatatgaaggaaggtgcaggcataactatacgtaaggtaaatcctgtggaactgataatagcgcctcgcctggcacctgagctttattaaaacctaagatcatcttgct

SEQ ID NO: 370 - protein, 517 aa, Nicotiana tabacum
MLSPIEAIVGLVTFTFLFFFLWTKKSQKPSKPLPPKIPGGWPVIGHLFHFNDDGDDRPLARKLGDLADKYGPVFTFRLGLPLVLVVSSYEAVKDCFSTNDAIFSNRPAFLYGNYLGYNNAMLFLANYGPYWRKNRKLVIQEVLSASRLEKFKHVRFARIQASIKNLYTRIDGNSSTINLTDWLEELNFGLIVKMIAGKNYESGKGDEQVERFKKAFKDLMILSMEFVLWDAFPIPLFKWVDFQGHVKAMKRTFKDIDSVFQNWLEEHINKREKMEVNAEGNEQDFIDVVLSKMSNEYLGEGYSRDTVIKATVFSLVLDAADTVALHINWGMALLINNQKALTKAQEEIDTKVGKDRWVEESDIKDLVYLQAIVKEVLRLYPPGPLLVPHENVEDCVVRGYHIPKGTRLFANVMKLQRDPKLWSDPDTFDPERFIATDIDFRGQYYKYIPFGSGRRSCPGMTYALQVEHLTMAHLIQGFNYRTPNDEPLDMKEGAGITIRKVNPVELIIAPRLAPELY

SEQ ID NO: 371 - DNA, 1573 bp, Nicotiana tabacum
atgctttctcccatagaagccattgtaggactagtaaccttcacatttctcttcttcttcctatggacaaaaaaatctcaaaaaccttcaaaacccttaccaccgaaaatccccggaggatggccggtaatcggccatcttttccacttcaatgacgacggcgacgaccgtccattagctcgaaaactcggagacttagctgacaaatacggccccgttttcacttttcggctaggccttccccttgtcttagttgtaagcagttacgaagctgtaaaagactgtttctctacaaatgacgccattttttccaatcgtccagcttttctttacggcgattaccttggctacaataatgccatgctatttttggccaattacggaccttactggcgaaaaaatcgaaaattagttattcaggaagttctctccgctagtcgtctcgaaaaattcaaacacgtgagatttgcaagaattcaagcgagcattaagaatttatatactcgaattgatggaaattcgagtacgataaatttaactgattggttagaagaattgaattttggtctgatcgtgaagatgatcgctggaaaaaattatgaatccggtaaaggagatgaacaagtggagagatttaagaaagcgtttaaggattttatgattttatcaatggagtttgtgttatgggatgcatttccaattccattatttaaatgggtggattttcaagggcatgttaaggctatgaaaaggacttttaaagatatagattctgtttttcagaattggttagaggaacatattaataaaagagaaaaaatggaggttaatgcagaagggaatgaacaagatttcattgatgtggtgctttcaaaaatgagtaatgaatatcttggtgaaggttactctcgtgatactgtcattaaagcaacggtgtttagtttggtcttggatgcagcagacacagttgctcttcacataaattggggaatggcattattgataaacaatcaaaaggccttgacgaaagcacaagaagagatagacacaaaagttggtaaggacagatgggtagaagagagtgatattaaggatttggtatacctccaagctattgttaaagaagtgttacgattatatccaccaggacctttgttagtaccacacgaaaatgtagaagattgtgttgttagtggatatcacattcctaaagggacaagattattcgcaaacgtcgtgaaactgcaacgtgatcctaaactctggtctgatcctgatactttcgatccagagagattcattgctactgatattgactttcgtggtcagtactataagtatatcccgtttggttctggaagacgatcttgtccagggatgacttatgcattgcaagtggaacacttaacaatggcacatttgatccaaggtttcaattacagaactccaaatgacgagcccttggatatgaaggaaggtgcaggcataactatacgtaaggtaaatcctgtggaactgataatagcgcctcgcctggcacctgagctttattaaaacctaagatcatcttgct

SEQ ID NO: 372 - protein, 517 aa, Nicotiana tabacum
MLSPIEAIVGLVTFTFLFFFLWTKKSQKPSKPLPPKIPGGWPVIGHLFHFNDDGDDRPLARKLGDLADKYGPVFTFRLGLPLVLVVSSYEAVKDCFSTNDAIFSNRPAFLYGDYLGYNNAMLFLANYGPYWRKNRKLVIQEVLSASRLEKFKHVRFARIQASIKNLYTRIDGNSSTINLTDWLEELNFGLIVKMIAGKNYESGKGDEQVERFKKAFKDFMILSMEFVLWDAFPIPLFKWVDFQGHVKAMKRTFKDIDSVFQNWLEEHINKREKMEVNAEGNEQDFIDVVLSKMSNEYLGEGYSRDTVIKATVFSLVLDAADTVALHINWGMALLINNQKALTKAQEEIDTKVGKDRWVEESDIKDLVYLQAIVKEVLRLYPPGPLLVPHENVEDCVVSGYHIPKGTRLFANVVKLQRDPKLWSDPDTFDPERFIATDIDFRGQYYKYIPFGSGRRSCPGMTYALQVEHLTMAHLIQGFNYRTPNDEPLDMKEGAGITIRKVNPVELIIAPRLAPELY

SEQ ID NO: 373 - DNA, 1577 bp, Nicotiana tabacum
cataatgctttctcccatagaagccattgtaggactagtaaccttcacatttctcttcttcttcctatggacaaaaaaatctcaaaaaccttcaaaacccttaccaccgaaaatccccggaggatggccggtaatcggccatcttttccacttcaatgacgacggcgacgaccgtccattagctcgaaaactcggagacttagctgacaaatacggccccgttttcacttttcggctaggccttccccttgtcttagttgtaagcagttacgaagctgtaaaagactgtttctctacaaatgacgccattttttccaatcgtccagcttttctttacggcgattaccttggctacaataatgccatgctatttttggccaattacggaccttactggcgaaaaaatcgaaaattagttattcaggaagttctctccgctagtcgtctcgaaaaattcaaacacgtgagatttgcaagaattcaagcgagcattaagaatttatatactcgaattgatggaaattcgagtacgataaatttaactgattggttagaagaattgaattttggtctgatcgtgaagatgatcgctggaaaaaattatgaatccggtaaaggagatgaacaagtggagagatttaagaaagcgtttaaggattttatgattttatcaatggagtttgtgttatgggattcatttccaattccattatttaaatgggtggattttcaagggcatgttaaggctatgaaaaggacttttaaagatatagattctgtttttcagaattggttagaggaacatattaataaaagagaaaaaatggaggttaatgcagaagggaatgaacaagatttcattgatgtggtgctttcaaaaatgagtaatgaatatcttggtgaaggttactctcgtgatactgtcattaaagcaacggtgtttagtttggtcttggatgcagcagacacagttgctcttcacataaattggggaatggcattattgatgaacaatcaaaaggccttgacgaaagcacaagaagagatagacacaaaagttggtaaggacagatgggtagaagagagtgatattaaggatttggtatacctccaagctattgttaaagaagtgttacgattatatccaccaggacctttgttagtaccacacgaaaatgtagaagattgtgttgttagtggatatcacattcctaaagggacaagattattcgcaaacgtcatgaaactgcaacgtgatcctaaactctggtctgatcctgatactttcgatccagagagattcattgctactgatattggctttcgtggtcagtactataagtatatcccgtttggttctggaagacgatcttgtccagggatgacttatgcattgcaagtggaacacttaacaatggcacatttgatccaaggtttcaattacagaactccaaatgacgagcccttggatatgaaggaaggtgcaggcataactatacgtaaggtaaatcctgtggaactgataatagcgcctcgcctggcacctgagctttattaaaacctaagatcatcttgct

SEQ ID NO: 374 - protein, 517 aa, Nicotiana tabacum
MLSPIEAIVGLVTFTFLFFFLWTKKSQKPSKPLPPKIPGGWPVIGHLFHFNDDGDDRPLARKLGDLADKYGPVFTFRLGLPLVLVVSSYEAVKDCFSTNDAIFSNRPAFLYGDYLGYNNAMLFLANYGPYWRKNRKLVIQEVLSASRLEKFKHVRFARIQASIKNLYTRIDGNSSTINLTDWLEELNFGLIVKMIAGKNYESGKGDEQVERFKKAFKDFMILSMEFVLWDSFPIPLFKWVDFQGHVKAMKRTFKDIDSVFQNWLEEHINKREKMEVNAEGNEQDFIDVVLSKMSNEYLGEGYSRDTVIKATVFSLVLDAADTVALHINWGMALLMNNQKALTKAQEEIDTKVGKDRWVEESDIKDLVYLQAIVKEVLRLYPPGPLLVPHENVEDCVVSGYHIPKGTRLFANVMKLQRDPKLWSDPDTFDPERFIATDIGFRGQYYKYIPFGSGRRSCPGMTYALQVEHLTMAHLIQGFNYRTPNDEPLDMKEGAGITIRKVNPVELIIAPRLAPELY

SEQ ID NO: 375 - DNA, 1573 bp, Nicotiana tabacum
atgctttctcccatagaagccattgtaggactagtaaccttcacatttctcttcttcttcctatggacaaaaaaatctcaaaaaccttcaaaacccttaccaccgaaaatccccggaggatggccggtaatcggccatcttttccacttcaatgacgacggcgacgaccgtccattagctcgaaaactcggagacttagctgacaaatacggccccgttctcacttttcggctaggccttccccttgtcttagttgtaagcagttacgaagctgtaaaagactgtttctctacaaatgacgccattttttccaatcgtccagcttttctttacggcgattaccttggctacaataatgccatgctatttttggccaattacggaccttactggcgaaaaaatcgaaaattagttattcaggaagttctctccgctagtcgtctcgaaaaattcaaacacgtgagatttgcaagaattcaagcgagcattaagaatttatatactcgaattgatggaaattcgagtacgataaatttaactgattggttagaagaattgaattttggtctgatcgtgaagatgatcgctggaaaaaattatgaatccggtaaaggagatgaacaagtggagagatttaagaaagcgtttaaggattttatgattttatcaatggagtttgtgttatgggatgcatttccaattccattatttaaatgggtggactttcaagggcatgttaaggctatgaaaaggacttttaaagatatagattctgtttttcagaattggttagaggaacatattaataaaagagaaaaaatggaggttaatgcagaagggaatgaacaagatttcattgatgtggtgctttcaaaaatgagtaatgaatatcttggtgaaggttactctcgtgatactgtcattaaagcaacggtgtttagtttggtcttggatgcagcagacacagttgctcttcacataaattggggaatggcattattgataaacaatcaaaaggccttgacgaaagcacaagaagagatagacacaaaagttggtaaggacagatgggtagaagagagtgatattaaggatttggtatacctccaagctattgttaaagaagtgttacgattatatccaccaggacctttgttagtaccacacgaaaatgtagaagattgtgttgttagtggatatcacattcctaaagggacaagattattcgcaaacgtcatgaaactgcaacgtgatcctaaactctggtctgatcctgatactttcgatccagagagattcattgctactgatattgactttcgtggtcagtactataagtatatcccgtttggttctggaagacgatcttgtccagggatgacttatgcattgcaagtggaacacttaacaatggcacatttgatccaaggtttcaattacagaactccaaatgacgagcccttggatatgaaggaaggtgcaggcataactatacgtaaggtaaatcctgtggaactgataatagcgcctcgcctggcacctgagctttattaaaacctaagatcatcttgct

SEQ ID NO: 376 - protein, 517 aa, Nicotiana tabacum
MLSPIEAIVGLVTFTFLFFFLWTKKSQKPSKPLPPKIPGGWPVIGHLFHFNDDGDDRPLARKLGDLADKYGPVFTFRLGLPLVLVVSSYEAVKDCFSTNDAIFSNRPAFLYGDYLGYNNAMLFLANYGPYWRKNRKLVIQEVLSASRLEKFKHVRFARIQASIKNLYTRIDGNSSTINLTDWLEELNFGLIVKMIAGKNYESGKGDEQVERFKKAFKDFMILSMEFVLWDAFPIPLFKWVDFQGHVKAMKRAFKDIDSVFQNWLEEHINKREKMEVNAEGNEQDFIDVVLSKMSNEYLGEGYSRDTVIKATVFSLVLDAADTVALHINWGMALLINNQKALTKAQEEIDTKVGKDRWVEESDIKDLVYLQAIVKEVLRLYPPGPLLVPHENVEDCVVSGYHIPKGTRLFVNVMKLQRDPKLWSDPDTFDPERFIATDIDFRGQYYKYIPFGSGRRSCPGMTYALQVEHLTMAHLIQGFNYRTPNDEPLDMKEGAGITIRKVNPVELIIAPRLAPELY

SEQ ID NO: 377 - DNA, 1573 bp, Nicotiana tabacum
atgctttctcccatagaagccattgtaggactagtaaccttcacatttctcttcttcttcctatggacaaaaaaatctcaaaaaccttcaaaacccttaccaccgaaaatccccggaggatggccggtaatcggccatcttttccacttcaatgacgacggcgatgaccgtccattagctcgaaaactcggagacttagctgacaaatacggccccgttttcacttttcggctaggccttccccttgtcttagttgtaagcagttacgaagctgtaaaagactgtttctctacaaatgacgccattttttccaatcgtccagcttttctttacggcgattaccttggctacaataatgccatgctatttttggccaattacggaccttactggcgaaaaaatcgaaaattagttattcaggaagttctctccgctagtcgtctcgaaaaattcaaacacgtgagatttgcaagaattcaagcgagcattaagaatttatatactcgaattgatggaaattcgagtacgataaatttaactgattggttagaagaattgaattttggcctgatcgtgaagatgatcgctggaaaaaattatgaatccggtaaaggagatgaacaagtggagagatttaagaaagcgtttaaggattttatgattttatcaatggagtttgtgttatgggatgcatttccaattccattatttaaatgggtggattttcaagggcatgttaaggctatgaaaagggcttttaaagatatagattctgtttttcagaattggttagaggaacatattaataaaagagaaaaaatggaggttaatgcagaagggaatgaacaagatttcattgatgtggtgctttcaaaaatgagtaatgaatatcttggtgaaggttactctcgtgatactgtcattaaagcaacggtgtttagtttggtcttggatgcagcagacacagttgctcttcacataaattggggaatggcattattgataaacaatcaaaaggccttgacgaaagcacaagaagagatagacacaaaagttggtaaggacagatgggtagaagagagtgatattaaggatttggtatacctccaagctattgttaaagaagtgttacgattatatccaccaggacctttgttagtaccacacgaaaatgtagaagattgtgttgttagtggatatcacattcctaaagggacaagattattcgtaaacgtcatgaaactgcaacgtgatcctaaactctggtctgatcctgatactttcgatccagagagattcattgctactgatattgactttcgtggtcagtactataagtatatcccgtttggttctggaagacgatcttgtccagggatgacttatgcattgcaagtggaacacttaacaatggcacatttgatccaaggtttcaattacagaactccaaatgacgagcccttggatatgaaggaaggtgcaggcataactatacgtaaggtaaatcctgtggaactgataatagcgcctcgcctggcacctgagctttattaaaacctaagatcatcttgct

SEQ ID NO: 378 - protein, 517 aa, Nicotiana tabacum; identical to SEQ ID NO: 376

SEQ ID NO: 379 - DNA, 1573 bp, Nicotiana tabacum
atgctttctcccatagaagccattgtaggactagtaaccttcacatttctcttcttcttcctatggacaaaaaaatctcaaaaaccttcaaaacccttaccaccgaaaatccccggaggatggccggtaatcggccatcttttccacttcaatgacgacggcgacgaccgtccattagctcgaaaactcggagacttagctgacaaatacggccccgttttcacttttcggctaggccttccccttgtcttagttgtaagcagttacgaagctgtaaaagactgtttctctacaaatgacgccattttttccaatcgtccagcttttctttacggcgattaccttggctacaataatgccatgctatttttggccaattacggaccttactggcgaaaaaatcgaaaattagttattcaggaagttctctccgctagtcgtctcgaaaaattcaaacacgtgagatttgcaagaattcaagcgagcattaagaatttatatactcgaattgatggaaattcgagtacgataaatttaactgattggttagaagaattgaattttggtctggtcgtgaagatgatcgctggaaaaaattatgaatccggtaaaggagatgaacaagtggagagatttaagaaagcgtttgaggattttatgattttatcaatggagtttgtgttatgggatgcatttccaattccattatttaaatgggtggattttcaagggcatgttaaggctatgaaaaggacttttaaagatatagattctgtttttcagaattggttagaggaacatattaataaaagagaaaaaatggaggttaatgcagaagggaatgaacaagatttcattgatgtggtgctttcaaaaatgagtaatgaatatcttggtgaaggttactctcgtgatactgtcattaaagcaacggtgtttagtttggtcttggatgcagcagacacagttgctcttcacataaattggggaatggcattattgataaacaatcaaaaggccttgacgaaagcacaagaagagatagacacaaaagttggtaaggacagatgggtagaagagagtgatattaaggatttggtatacctccaagctattgttaaagaagtgttacgattatatccaccaggacctttgttagtaccacacgaaaatgtagaagattgtgttgttagtggatatcacattcctaaagggacaagattattcgcaaacgtcatgaaactgcaacgtgatcctaaactctggtctgatcctgatactttcgatccagagagattcattgctactgatattgactttcgtggtcagtactataagtatatcccgtttggttctggaagacgatcttgtccagggatgacttatgcattgcaagtggaacacttaacaatggcacatttgatccaaggtttcaattacagaactccaaatgacgagcccttggatatgaaggaaggtgcaggcataactatacgtaaggtaaatcctgtggaactgataatagcgcctcgcctggcacctgagctttattaaaacctaagatcatcttgct

SEQ ID NO: 380 - protein, 517 aa, Nicotiana tabacum
MLSPIEAIVGLVTFTFLFFFLWTKKSQKPSKPLPPKIPGGWPVIGHLFHFNDDGDDRPLARKLGDLADKYGPVFTFRLGLPLVLVVSSYEAVKDCFSTNDAIFSNRPAFLYGDYLGYNNAMLFLANYGPYWRKNRKLVIQEVLSASRLEKFKHVRFARIQASIKNLYTRIDGNSSTINLTDWLEELNFGLVVKMIAGKNYESGKGDEQVERFKKAFEDFMILSMEFVLWDAFPIPLFKWVDFQGHVKAMKRTFKDIDSVFQNWLEEHINKREKMEVNAEGNEQDFIDVVLSKMSNEYLGEGYSRDTVIKATVFSLVLDAADTVALHINWGMALLINNQKALTKAQEEIDTKVGKDRWVEESDIKDLVYLQAIVKEVLRLYPPGPLLVPHENVEDCVVSGYHIPKGTRLFANVMKLQRDPKLWSDPDTFDPERFIATDIDFRGQYYKYIPFGSGRRSCPGMTYALQVEHLTMAHLIQGFNYRTPNDEPLDMKEGAGITIRKVNPVELIIAPRLAPELY

SEQ ID NO: 381 - DNA, 1573 bp, Nicotiana tabacum
atgctttctcccatagaagccattgtaggactagtaaccttcacatttctcttcttcttcctatggacaaaaaaatctcaaaaaccttcaaaacccttaccaccgaaaatccccggaggatggccggtaatcggccatcttttccacttcaatgacgacggcgacgaccgtccattagctcaaaaactcggagacttagctgacaaatacggccccgttttcacttttcggctaggccttccccttgtcttagttgtaagcagttacgaagctgtaaaagactgtttctctacagatgacgccattttttccaatcgtccagcttttctttacggcgattaccttggctacaataatgccatgctatttttggccaattacggaccttactggcgaaaaaatcgaaaattagttattcaggaagttctctccgctagtcgtctcgaaaaattcaaacacgtgagatttgcaagaattcaagcgagcattaagaatttatatactcgaattgatggaaattcgagtacgataaatttaactgattggttagaagaattgaattttggtctgatcgtgaagatgatcgctggaaaaaattatgaatccggtaaaggagatgaacaagtggagagatttaagaaagcgtttaaggattttatgattttatcaatggagtttgtgttatgggatgcatttccaattccattatttaaatgggtggattttcaagggcatgttaaggctatgaaaaggacttttaaagatatagattctgtttttcagaattggttagaggaacatattaataaaagagaaaaaatggaggttaatgcagaagggaatgaacaagatttcattgatgtggtgctttcaaaaatgagtaatgaatatcttggtgaaggttactctcgtgatactgtcattaaagcaacggtgtttggtttggtcttggatgcagcagacacagttgctcttcacataaattggggaatggcattattgataaacaatcaaaaggccttgacgaaagcacaagaagagatagacacaaaagttggtaaggacagatgggtagaagagagtgatattaaggatttggtatacctccaagctattgttaaagaagtgttacgattatatccaccaggacctttgttagtaccacacgaaaatgtagaagattgtgttgttagtggatatcacattcctaaagggacaagattattcgcaaacgtcatgaaactgcaacgtgatcctaaactctggtctgatcctgatactttcgatccagagagattcattgctactgatattgactttcgtggtcagtactataagtatatcccgtttggttctggaagacgatcttgtccagggatgacttatgcattgcaagtggaacacttaacaatagcacatttgatccaaggtttcaattacagaactccaaatgacgagcccttggatatgaaggaaggtgcaggcataactatacgtaaggtaaatcctgtggaactgataatagcgcctcgcctggcacctgagctttattaaaacctaagatcatcttgct

SEQ ID NO: 382 - protein, 517 aa, Nicotiana tabacum
MLSPIEAIVGLVTFTFLFFFLWTKKSQKPSKPLPPKIPGGWPVIGHLFHFNDDGDDRPLAQKLGDLADKYGPVFTFRLGLPLVLVVSSYEAVKDCFSTDDAIFSNRPAFLYGDYLGYNNAMLFLANYGPYWRKNRKLVIQEVLSASRLEKFKHVRFARIQASIKNLYTRIDGNSSTINLTDWLEELNFGLIVKMIAGKNYESGKGDEQVERFKKAFKDFMILSMEFVLWDAFPIPLFKWVDFQGHVKAMKRTFKDIDSVFQNWLEEHINKREKMEVNAEGNEQDFIDVVLSKMSNEYLGEGYSRDTVIKATVFGLVLDAADTVALHINWGMALLINNQKALTKAQEEIDTKVGKDRWVEESDIKDLVYLQAIVKEVLRLYPPGPLLVPHENVEDCVVSGYHIPKGTRLFANVMKLQRDPKLWSDPDTFDPERFIATDIDFRGQYYKYIPFGSGRRSCPGMTYALQVEHLTIAHLIQGFNYRTPNDEPLDMKEGAGITIRKVNPVELIIAPRLAPELY

SEQ ID NO: 383 - DNA, 1575 bp, Nicotiana tabacum
atgctttctcccatagaagccattgtaggactagtaaccttcacatttctcttcttcttcctatggacaaaaaaatctcaaaaaccttcaaaacccttaccaccgaaaatccccggaggatggccggtaatcggccatcttttccacttcaatgacgacggcgacgaccgtccattagctcgaaaactcggagacttagctgacaaatacggccccgttttcacttttcggctaggccttccccttgtcttagttgtaagcagttacgaagctgtaaaagactgtttctctacaaatgacgccattttttccaatcgtccagcttttctttacggcgattaccttggctacaataatgccatgctatttttggccaattacggaccttactggcgaaaaaatcgaaaattagttattcaggaagttctctccgctagtcgtctcgaaaaattcaaacacgtgagatttgcaagaattcaagcgagcattaagaatttatatactcgaattgatggaaattcgagtacgataaatttaactgattggttagaagaattgaattttggtctgatcgtgaagatgatcgctggaaaaaattatgaatccggtaaaggagatgaacaagtggagagatttaagaaagcgtttaaggattttatgattttatcaatggagtttgtgttatgggatgcatttccaattccattatttaaatgggtggattttcaagggcatgttaaggctatgaaaaggacttttaaagatatagattctgtttttcagaattggttagaggaacatattaataaaagagaaaaaatggaggttaatgcagaagggaatgaacaagatttcattgatgtggtgctttcaaaaatgagtaatgaatatcttggtgaaggttactctcgtgatactgtcattaaagcaacggtgtttagtttggtcttggatgcagcagacacagttgctcttcacataaattggggaatggcattattgataaacaatcaaaaggccttgacgaaagcacaagaagagatagacacaaaagttggtaaggacagatgggtagaagagagtgatattaaggatttggtatacctccaagctattgttaaagaagtgttacgattatatccaccaggacctttgttagtaccacacgaaaatgtagaagattgtgttgttagtggatatcacattcctaaagggacaagattattcgcaaacgtcatgaaactgcaacgtgatcctaaactctggtctgatcctgatactttcgatccagagagattcattgctactgatattgactttcgtggtcagtactataagtatatcccgtttggttctggaagacgatcttgtccagggatgacttatgcattgcaagtggaacacttaacaatggcacatttgatccaaggtttcaattacagaactccaaatgacgagccctcggatatgaaggaaggtgcaggcataactatacgtaaagtaaatcctgtggaactgataatagcgcctcgcctggcacctgagctttattaaaacctaagatcatcttgcttg

SEQ ID NO: 384 - protein, 517 aa, Nicotiana tabacum
MLSPIEAIVGLVTFTFLFFFLWTKKSQKPSKPLPPKIPGGWPVIGHLFHFNDDGDDRPLARKLGDLADKYGPVFTFRLGLPLVLVVSSYEAVKDCFSTNDAIFSNRPAFLYGDYLGYNNAMLFLANYGPYWRKNRKLVIQEVLSASRLEKFKHVRFARIQASIKNLYTRIDGNSSTINLTDWLEELNFGLIVKMIAGKNYESGKGDEQVERFKKAFKDFMILSMEFVLWDAFPIPLFKWVDFQGHVKAMKRTFKDIDSVFQNWLEEHINKREKMEVNAEGNEQDFIDVVLSKMSNEYLGEGYSRDTVIKATVFSLVLDAADTVALHINWGMALLINNQKALTKAQEEIDTKVGKDRWVEESDIKDLVYLQAIVKEVLRLYPPGPLLVPHENVEDCVVSGYHIPKGTRLFANVMKLQRDPKLWSDPDTFDPERFIATDIDFRGQYYKYIPFGSGRRSCPGMTYALQVEHLTMAHLIQGFNYRTPNDEPSDMKEGAGITIRKVNPVELIIAPRLAPELY

SEQ ID NO: 385 - DNA, 25 bp, Artificial Sequence
  Probe Sequence
gaaagcgtttaaggattttatgatt

SEQ ID NO: 386 - DNA, 25 bp, Artificial Sequence
  Probe Sequence
gattttatcaatggagtttgtgtta

SEQ ID NO: 387 - DNA, 25 bp, Artificial Sequence
  Probe Sequence
ttatgggatgcatttccaattccat

SEQ ID NO: 388 - DNA, 25 bp, Artificial Sequence
  Probe Sequence
tgggatgcatttccaattccattat

SEQ ID NO: 389 - DNA, 25 bp, Artificial Sequence
  Probe Sequence
ggatgcatttccaattccattattt

SEQ ID NO: 390 - DNA, 25 bp, Artificial Sequence
  Probe Sequence
gatgcatttccaattccattattta

SEQ ID NO: 391 - DNA, 25 bp, Artificial Sequence
  Probe Sequence
tgcatttccaattccattatttaaa

SEQ ID NO: 392 - DNA, 25 bp, Artificial Sequence
  Probe Sequence
gcatttccaattccattatttaaat

SEQ ID NO: 393 - DNA, 25 bp, Artificial Sequence
  Probe Sequence
tatttaaatgggtggattttcaagg

SEQ ID NO: 394 - DNA, 25 bp, Artificial Sequence
  Probe Sequence
attttcaagggcatgttaaggctat

SEQ ID NO: 395 - DNA, 25 bp, Artificial Sequence
  Probe Sequence
caagggcatgttaaggctatgaaaa

SEQ ID NO: 396 - DNA, 25 bp, Artificial Sequence
  Probe Sequence
ggcatgttaaggctatgaaaaggac

SEQ ID NO: 397 - DNA, 25 bp, Artificial Sequence
  Probe Sequence
tgttaaggctatgaaaaggactttt

SEQ ID NO: 398 - DNA, 25 bp, Artificial Sequence
  Probe Sequence
aaggttactctcgtgatactgtcat

SEQ ID NO: 399 - DNA, 25 bp, Artificial Sequence
  Probe Sequence
gcagacacagttgctcttcacataa

SEQ ID NO: 400 - DNA, 25 bp, Artificial Sequence
  Probe Sequence
acagttgctcttcacataaattggg

SEQ ID NO: 401 - DNA, 25 bp, Artificial Sequence
  Probe Sequence
ggtatacctccaagctattgttaaa

SEQ ID NO: 402 - DNA, 25 bp, Artificial Sequence
  Probe Sequence
gtgttacgattatatccaccaggac

SEQ ID NO: 403 - DNA, 25 bp, Artificial Sequence
  Probe Sequence
tacgattatatccaccaggaccttt

SEQ ID NO: 404 - DNA, 25 bp, Artificial Sequence
  Probe Sequence
ccaggacctttgttagtaccacacg

SEQ ID NO: 405 - DNA, 25 bp, Artificial Sequence
  Probe Sequence
cctttgttagtaccacacgaaaatg

SEQ ID NO: 406 - DNA, 25 bp, Artificial Sequence
  Probe Sequence
tacgtgatcctaaactctggcctga

SEQ ID NO: 407 - DNA, 25 bp, Artificial Sequence
  Probe Sequence
ctgatcctgatactttcgatccaga

SEQ ID NO: 408 - DNA, 25 bp, Artificial Sequence
  Probe Sequence
gactttcgtggtcagtactataagt

SEQ ID NO: 409 - DNA, 25 bp, Artificial Sequence
  Probe Sequence
tggtcagtactataagtatatcccg

SEQ ID NO: 410 - DNA, 25 bp, Artificial Sequence
  Probe Sequence
gaattgaattttggtctgatcgtga

SEQ ID NO: 411 - DNA, 25 bp, Artificial Sequence
  Probe Sequence
tggtctgatcgtgaagatgatcgct

SEQ ID NO: 412 - DNA, 25 bp, Artificial Sequence
  Probe Sequence
atcgtgaagatgatcgctggaaaaa

SEQ ID NO: 413 - DNA, 25 bp, Artificial Sequence
  Probe Sequence
gatgatcgctggaaaaaattatgaa

SEQ ID NO: 414 - DNA, 25 bp, Artificial Sequence
  Probe Sequence
tatgaatccggtaaaggagatgaac

SEQ ID NO: 415 - DNA, 25 bp, Artificial Sequence
  Probe Sequence
tccggtaaaggagatgaacaagtgg

SEQ ID NO: 416 - DNA, 25 bp, Artificial Sequence
  Probe Sequence
aacaagtggagagatttaagaaagc

SEQ ID NO: 417 - DNA, 25 bp, Artificial Sequence
  Probe Sequence
gattttatcaatggagtttgtgtta

SEQ ID NO: 418 - DNA, 25 bp, Artificial Sequence
  Probe Sequence
ttatgggatgcatttccaattccat

SEQ ID NO: 419 - DNA, 25 bp, Artificial Sequence
  Probe Sequence
tgggatgcatttccaattccattat

SEQ ID NO: 420 - DNA, 25 bp, Artificial Sequence
  Probe Sequence
ggatgcatttccaattccattattt

SEQ ID NO: 421 - DNA, 25 bp, Artificial Sequence
  Probe Sequence
gatgcatttccaattccattattta

SEQ ID NO: 422 - DNA, 25 bp, Artificial Sequence
  Probe Sequence
tgcatttccaattccattatttaaa

SEQ ID NO: 423 - DNA, 25 bp, Artificial Sequence
  Probe Sequence
cattatttaaatgggtggattttca

SEQ ID NO: 424 - DNA, 25 bp, Artificial Sequence
  Probe Sequence
attttcaagggcatgttaaggctat

SEQ ID NO: 425 - DNA, 25 bp, Artificial Sequence
  Probe Sequence
caagggcatgttaaggctatgaaaa

SEQ ID NO: 426 - DNA, 25 bp, Artificial Sequence
  Probe Sequence
tgttaaggctatgaaaaggactttt

SEQ ID NO: 427 - DNA, 25 bp, Artificial Sequence
  Probe Sequence
aaggttactctcgtgatactgtcat

SEQ ID NO: 428 - DNA, 25 bp, Artificial Sequence
  Probe Sequence
gcagacacagttgctcttcacataa

SEQ ID NO: 429 - DNA, 25 bp, Artificial Sequence
  Probe Sequence
gttacgattatatccaccaggacct

SEQ ID NO: 430 - DNA, 25 bp, Artificial Sequence
  Probe Sequence
ccaggacctttgttagtaccacacg

SEQ ID NO: 431 - DNA, 25 bp, Artificial Sequence
  Probe Sequence
cctttgttagtaccacacgaaaatg

SEQ ID NO: 432 - DNA, 25 bp, Artificial Sequence
  Probe Sequence
aactctggtctgatcctgatacttt

SEQ ID NO: 433 - DNA, 25 bp, Artificial Sequence
  Probe Sequence
gactttcgtggtcagtactataagt

SEQ ID NO: 434 - DNA, 25 bp, Artificial Sequence
  Probe Sequence
tggtcagtactataagtatatcccg

SEQ ID NO: 435 - DNA, 25 bp, Artificial Sequence
  Probe Sequence
gatccaaggtttcaattacagaact

SEQ ID NO: 436 - DNA, 25 bp, Artificial Sequence
  Probe Sequence
gtgcaggcataactatacgtaaggt

SEQ ID NO: 437 - DNA, 25 bp, Artificial Sequence
  Probe Sequence
aatcctgtggaactgataatagcgc

SEQ ID NO: 438 - DNA, 25 bp, Artificial Sequence
  Probe Sequence
atcctgtggaactgataatagcgcc

SEQ ID NO: 439 - DNA, 25 bp, Artificial Sequence
  Probe Sequence
cctgtggaactgataatagcgcctc

SEQ ID NO: 440 - DNA, 25 bp, Artificial Sequence
  Probe Sequence
tgtggaactgataatagcgcctcgc

SEQ ID NO: 441 - DNA, 25 bp, Artificial Sequence
  Probe Sequence
ggaactgataatagcgcctcgcctg

SEQ ID NO: 442 - DNA, 25 bp, Artificial Sequence
  Probe Sequence
gaactgataatagcgcctcgcctgg

SEQ ID NO: 443 - DNA, 25 bp, Artificial Sequence
  Probe Sequence
actgataatagcgcctcgcctggca

SEQ ID NO: 444 - DNA, 25 bp, Artificial Sequence
  Probe Sequence
tcgcctggcacctgagctttattaa

SEQ ID NO: 445 - DNA, 25 bp, Artificial Sequence
  Probe Sequence
ctggcacctgagctttattaaaacc

SEQ ID NO: 446 - DNA, 393 bp, Nicotiana tabacum
gtttttcccatagaagcctttgtaggactagtaaccttcacatttctctcatacttcctatggacaaaaaaatctcaaaaacttccaaaacccttaccaccgaaaatccccggaggatggccggtaatcggccatctttttcacttcaataacgacggcgacgaccgtccattagctcgaaaactcggagacttagctgataaatacggccccgttttcacttttcggctaggtcttccccttgtgctagttgtaagcagttacgaagctataaaagattgcttctctacaaatgacgccattttctccaatcgtccagcttttctttacggcgaataccttggctacaataatacaatgctttttctagcaaattacggaccttactggcga

SEQ ID NO: 447 - DNA, 479 bp, Nicotiana tabacum
tagtatacctccaagctattgttaaaaaggtgttacgattatatccaccaggacctttgttagtaccacatgaaaatgtaaaggattgtgttgttagtggatatcacattcctaaagggactagattattcgcaaacgtcatgaaactgcagcgcgatcctaaattcttgtcaaatcctgataagttcgatccagagagattcatcgctggtgatattgacttccgtggtcaccactatgagtttatcccatttggttctggaagacgatcttgtccggggatgacttatgcatcgcaagtggaacacctaacaatggcacatttagtccagggtttcaattacaaaactccaaatgacgaggccttggatatgaaggaaggtgcaggcataacaatacgtaaggtaaatccagtggaattgatagtaacgcctcgcttggcacctgagctttactaaacctaagatctttcatcttgg

SEQ ID NO: 448 - protein, 151 aa, Nicotiana tabacum
VYLQAIVKKVLRLYPPGPLLVPHENVKDCVVSGYHIPKGTRLFANVMKLQRDPKFLSNPDKFDPERFIAGDIDFRGHHYEFIPFGSGRRSCPGMTYASQVEHLTMAHLVQGFNYKTPNDEALDMKEGAGITIRKVNPVELIVTPRLAPELY

SEQ ID NO: 449 - DNA, 512 bp, Nicotiana tabacum
ggatagatgggtagaagagagtgatattaaggatttggtgtacctccaagctattgtcaaagaagtgttacgattgtatccaccaggacctttgttagtaccacatgaaaatgtggaggattgtgttgttagtggatatcacattcctaaagggactagactatttgcgaatgtcatgaaactgtaacgcgatcctaaactctggccaaatcctgataatttcgatccagagagattcatcgctgcagatattgacttccgtggtcagcactatgagtatatcccgtttggttctggaagacgatcttgtccggggatgacttatgcattgcaagcggaacatctaacaatggcacatttgatccaaggtttcaattacaggactccaactaacgagcccttggatatgaaggaaggtgcaggcataactatacgtaaggtaaatcctgtggaagtgctaattaagcctcgcctggcacccgagctttattaaaacctaagatcatcttgct

SEQ ID NO: 450 - protein, 61 aa, Nicotiana tabacum
DRWVEESDIKDLVYLQAIVKEVLRLYPPGPLLVPHENVEDCVVSGYHIPKGTRLFANVMKL

SEQ ID NO: 451 - DNA, 503 bp, Nicotiana tabacum
aggatagatgggtagaagagagtgatattaaggatttggtgtacctccaagctattgtcaaagaagtgttacgattgtatccaccaggacctttgttagtaccacatgaaaatgtagaggattgtgttgttagtggatatcacattcctaaagggactagactatttgcgaatgtcatgaaactgcaacgcgatcctaaactctggccaaatcctgataatttcgatccagagagattcgtcgctgcagatattgacttccgtggtcagcactatgagtatatcccgtttggttctggaagacgatcttgtccgggggtgacttatgcattgcaagtggaacatcacatttgatccaaggtttcaattacaggactccaactaacgagcccttggatatgaaggaaggtgcacgcataactatacgtaaggtaaatcctgtggaagtgctaattaagcctagcctggcacctgagctttattaaaacctaagatcatcttgct

SEQ ID NO: 452 - protein, 68 aa, Nicotiana tabacum
VYPVWFWKTILSGGDLCIASGTSHLIQGFNYRTPTNEPLDMKEGARITIRKVNPVEVLIKPSLAPELY

SEQ ID NO: 453 - DNA, 410 bp, Nicotiana tabacum
ctgaaatagagggagtataatattcatttcaagagatcactataaaaaggaagttcgtgatagtttgattctcaagttcttatctaaaaatccataatggtttttcccatagaagccattgtaggactagtaaccttcacatttctcttatacttcctatggacaaaaaaatctcaaaaacctccaaaacccttaccaccgaaaatccccggaggatggccggtaatcggccatcttttctacttcgataacgaaggcgacgaccgtccattagctcggagacttagctgataaatacggccccgttttcacttttcggctaggtcttccccttgtgctagttgtaagcagttatgaagctataaaagattgcttctctacaaatgacgccattttctccaatcgtccag

SEQ ID NO: 454 - protein, 60 aa, Nicotiana tabacum
MVFPIEAIVGLVTFTFLLYFLWTKKSQKPPKPLPPKIPGGWPVIGHLFYFDNEGDDRPLA

SEQ ID NO: 455 - DNA, 421 bp, Nicotiana tabacum
ggacctttgttagtaccacatgaaaatgtaaaggattgtgttgttagtggatatcacattcctaaagggactagattattcgcaaacgtcatgaaactgcagcgcgatcctaaattcttgtcaaatcctgataagttcgatccagagagattcatcgctggtgatattgacttccgtggtcaccactatgagtttatcccatttggtcctggaagacgatcttgtccggggatgacttatgcattgcaagtggaacacctaacaatggcacatttaatccagggtttcaattacaaaactccaaatgacgagcccttggatatgaaggaaggtgcaggcataactatacgtaaggtaaatcctgtggaactgataatagcgcctcgcctggcacctgagctttattaaaacctaagatcat

SEQ ID NO: 456 - protein, 135 aa, Nicotiana tabacum
GPLLVPHENVKDCVVSGYHIPKGTRLFANVMKLQRDPKFLSNPDKFDPERFIAGDIDFRGHHYEFIPFGPGRRSCPGMTYALQVEHLTMAHLIQGFNYKTPNDEPLDMKEGAGITIRKVNPVELIIAPRLAPELY

SEQ ID NO: 457 - DNA, 577 bp, Nicotiana tabacum
atgacattattgataaacaatcaaaatgccttgatgaaagcacaagaagagatagacacaaaagttggtaaggatagatgggtagaagagagtgatattaaggatttagtatacctccaagctattgttaaaaaggtgttacgattatatccaccaggacctttgttagtaccacatgaaaatgtaaaggattgtgttgttagtggatatcacattcctaaagggactagattattcgcaaacgtcatgaaactgcagcgcgatcctaaactcttgtcaaatcctgataagttcgatccagagagattcatcgctggtgatattgacttccgtggtcaccactatgagtttatcccatttggttctggaagacgatcttgtccggggatgacttatgcattgcaagtggaacacctaacaatggcacatttaatccagggtttcaattacaagactccaaatggcgaggccttggatatgaaggaaggtgcaggcataacaatacgtaaggtaaatccagtggaattgataatagcgcctcgcctggcacctgagctttattaatacctaagatcat

SEQ ID NO: 458 - protein, 187 aa, Nicotiana tabacum
MTLLINNQNALMKAQEEIDTKVGKDRWVEESDIKDLVYLQAIVKKVLRLYPPGPLLVPHENVKDCVVSGYHIPKGTRLFANVMKLQRDPKLLSNPDKFDPERFIAGDIDFRGHHYEFIPFGSGRRSCPGMTYALQVEHLTMAHLIQGFNYKTPNGEALDMKEGAGITIRKVNPVELIIAPRLAPELY

SEQ ID NO: 459 - DNA, 381 bp, Nicotiana tabacum
ggatatcacattcctaaagggactagattattcgcaaacgtcatgaaactgcagcgcgatcctaaactcttgtcaaatcctgataagttcgatccagagagattcatcgctggtgatattgacttccgtggtcaccactatgagtttatcccatttggttctggaagacgatcttgtccggggatgacttatgcattgcaagtggaacacctaacaatggcacatttaatccagggtttcaattacaaaactccaaatgacgaggccttggatatgaaggaaggtgcaggcataacaatacgtaaggtaaatccagtggaattgataataacgcctcgcttggcacctgagctttattaaaacctaagatcatcttgcttg

SEQ ID NO: 460 - protein, 119 aa, Nicotiana tabacum
GYHIPKGTRLFANVMKLQRDPKLLSNPDKFDPERFIAGDIDFRGHHYEFIPFGSGRRSCPGMTYALQVEHLTMAHLIQGFNYKTPNDEALDMKEGAGITIRKVNPVELIITPRLAPELY

SEQ ID NO: 461 - DNA, 444 bp, Nicotiana tabacum
cgattatatccaccgggacctttattagtaccccatgaaaatgtagaggattgtgttgttagtggatatcacattcctaaagggactagactattcgcgaacgttatgaaattacagcgcgatcctaaactctggtcaaatcctgataagttcgatccagagagatttttcgctgctgatattgactttcgtggtcaacactatgagtttatcccatttggttctggaagacgatcttgtccggggatgacttatgctatgcaagtggaacacctaacaatcgcacacttgatccagggtttcaattacaaaactccaaatgacgagcccttggatatgaaggaaggtgcaggattaactatacgtaaggtaaatcctatagaagtggtaattacgcctcgcctgacacctgagctttattaaaacctaagatcatcttgcttg

SEQ ID NO: 462 - protein, 140 aa, Nicotiana tabacum
RLYPPGPLLVPHENVEDCVVSGYHIPKGTRLFANVMKLQRDPKLWSNPDKFDPERFFAADIDFRGQHYEFIPFGSGRRSCPGMTYAMQVEHLTIAHLIQGFNYKTPNDEPLDMKEGAGLTIRKVNPIEVVITPRLTPELY

SEQ ID NO: 463 - DNA, 379 bp, Nicotiana tabacum
atatcacattcctaaagggactagattattcgcaaacgtcatgaaactgcagcgcgatcctaaactcttgtcaaatcctgataagttcgatccagagagattcatcgctggtgatattgacttccgtggtcaccactatgagtttatcccatttggttctggaagacgatcttgtccggggatgacttatgcattgcaagtggaacacctaacaatggcacatttaatccagggtttcaattacaaaactccaaatgacgaggccttggatatgaaggaaggtgcaggcataacaatacgtaaggtaaatccagtggaattgataataacgcctcgcttggcacctgagctttattaaaacctaagatcatcttgcttg

SEQ ID NO: 464 - protein, 118 aa, Nicotiana tabacum
YHIPKGTRLFANVMKLQRDPKLLSNPDKFDPERFIAGDIDFRGHHYEFIPFGSGRRSCPGMTYALQVEHLTMAHLIQGFNYKTPNDEALDMKEGAGITIRKVNPVELIITPRLAPELY

SEQ ID NO: 465 - DNA, 440 bp, Nicotiana tabacum
gtgatactgtcataaaagcaacagtgtttagtttagtcttggatgctgcggacacagttgctcttcacatgaattggggaatggcattattgataaacaatcaacatgccttgaagaaagcgcaagaagagatagataaaaaagttggtaaggatagatgggtagaagagagtgatattaaggatttggtatacctccaaactattgttaaagaagtgttacgattatatccaccgggacctttattagtaccccatgaaaatgtagaggattgtgttgttagtggatatcacattcctaaagggactagactattcgcgaacgttatgaaattacagcgcgatcctaaactctggtcaaatcctgataagttcgatccagagagatttttcgctgctgatattgactttcgtggtcaacactatgagtttatcccattt

SEQ ID NO: 466 - protein, 146 aa, Nicotiana tabacum
DTVIKATVFSLVLDAADTVALHMNWGMALLINNQHALKKAQEEIDKKVGKDRWVEESDIKDLVYLQTIVKEVLRLYPPGPLLVPHENVEDCVVSGYHIPKGTRLFANVMKLQRDPKLWSNPDKFDPERFFAADIDFRGQHYEFIPF

SEQ ID NO: 467 - DNA, 386 bp, Nicotiana tabacum
ataatgctttctcccatagaagccattgtaggagcagtaaccctaattacatttctcttatacttcctatgtacaaaagaatctcaaaaacattcaaagcccttaccaacgaaaatccccggaggatggccggtaatcggccatcttttccacttcaataacgacggcgacgaccgtccattagctcgaaaactcggagacttagctgataaatacggccccgttttcacttttcggctaggtcttccccttgtgctagttgtaagcagttacgaagctttaaaagattgcttctctacaaatgacgccattttctccaatcgtccagcttttctttacggcgaataccttggctacaataatacaatgctttttctagcaaatta

SEQ ID NO: 468 - protein, 127 aa, Nicotiana tabacum
MLSPIEAIVGAVTLITFLLYFLCTKESQKHSKPLPTKIPGGWPVIGHLFHFNNDGDDRPLARKLGDLADKYGPVFTFRLGLPLVLVVSSYEALKDCFSTNDAIFSNRPAFLYGEYLGYNNTMLFLAN

SEQ ID NO: 469 - DNA, 552 bp, Nicotiana tabacum
agaaagcacaagaagagatagacacaaaagttggcaaggatagatgggtagaagagagtgatattaaggatttggtgtacctccaagctattgttaaagaagtgttacgattatatccaccgggacctttgttagtaccacatgaaaatatagaggattgtgttgttagtggatattacatttctaaagggactagactattcgcaaatgttatgaaactgcagcgcgatcctaaactctggccaaatcctgataatttcgatccagagagatttgtcgctgcaggtattgactttcgtggtcagcattatgagtatatcccgtttggttctggaagacgatcttgtccggggatgacttatgcattgcaagtggaacacttaacaatggcacatttgatccagggtttcaattacagcactccaaatgacgagcccttggatatgaaggaaggtgcaggtataactatacgtaaggtaaatcccgtggaagtgataattatgcctcgcctggcacctgagctttattaaaacctaagatctttcatcttgg

SEQ ID NO: 470 - protein, 175 aa, Nicotiana tabacum
KAQEEIDTKVGKDRWVEESDIKDLVYLQAIVKEVLRLYPPGPLLVPHENIEDCVVSGYYISKGTRLFANVMKLQRDPKLWPNPDNFDPERFVAAGIDFRGQHYEYIPFGSGRRSCPGMTYALQVEHLTMAHLIQGFNYSTPNDEPLDMKEGAGITIRKVNPVEVIIMPRLAPELY

SEQ ID NO: 471 - DNA, 609 bp, Nicotiana tabacum
ataatgctttctcccatagaagccattgtaggactagtaaccttcacatttctcttctacttcctatggacaaaaaaatctcaaaaaccttcaaaacccttaccaccgaaaatccccggaggatggccggtaattggccatcttttccacttcaatgacgacggcaacgaccgtccattagctcgaaaactcggagacttagctgacaaatacggccccgttttcacttttcggctaggccttccccttgtgttagttgtaagcagttacgaagctataaaagactgtttctctacaaatgatgccattttctctaatcgtccagcttttctttacggcgaataccttggctacaataatgccatgctatttttggcaaattacggaccttactggcgaaaaaatcgtaaattagttattcaggaagttctctcagctagtcgtctcaaaaaattcaaacacgtgagattcgccagaattcaaacgagcattaagaatttatacactcgaattgatagaaattcgagtacgataaatttaactgattggttagaagaattgaattttggtctcatcgtgaagatgatagctgggaaaaattatgattcc

SEQ ID NO: 472 - protein, 202 aa, Nicotiana tabacum
MLSPIEAIVGLVTFTFLFYFLWTKKSQKPSKPLPPKIPGGWPVIGHLFHFNDDGNDRPLARKLGDLADKYGPVFTFRLGLPLVLVVSSYEAIKDCFSTNDAIFSNRPAFLYGEYLGYNNAMLFLANYGPYWRKNRKLVIQEVLSASRLKKFKHVRFARIQTSIKNLYTRIDRNSSTINLTDWLEELNFGLIVKMIAGKNYDS

SEQ ID NO: 473 - DNA, 1277 bp, Nicotiana tabacum
ttgatttacatgtttggtcaagaacataaagaccatcgccgtcgaatggcccctaattttacccctaaagctcttgctacttacactgttatccaacaaaagattattatcaaacactttcagtcctggttggacgaagcatcccaatcccctaacaaaccaatcacacttcgcctcctttgccgcgatatgaacttggatacttcccagactgtcttcgttggtccatacttaaacgaagattccagaaagcagttcaatgttgactacaattacttcaatgttgggttaatgaaactccctgttgatttacctggtttcgccttcagagatgctaggttagctgttgggagactagtcgacacgctttccgtttgtgcagcacagagccaaattaagatgcgaggtgacgaagaacccacttgcttgattgatttttggatgcaggagaatttcagagagattcaggaagctaagattaatggttcacaaaagccgtttgagtataccagtaagcaacttggtggcttcttatttgacttcctctttgcggctcaagatgcttctacttcatctctgttatgggcaatggtgcttttggaatctcacccgcaagttctggagagagtccgagccgaagtggcgaaattctggtcgccagaatctgaggagcagccgttgacggcggagatgcttagggaaatgaagtacctggaggcggtggcgcgtgaggttgttaggatcagaactccggcggctttggtgccgcacattgccggcgaagaattccggttaactgatgattatgttattccaaaggggactattgttttcccttcggtttttgactcgtctttccaggggtttcctgaaccggagaagtttgacccggaccggttcacagaggagaggcaagaggaacgggtttacaagaagaattatctagcatttggagctgggccccatggatgtgtgggacagaggtatgctataaaccatttgatgctctttattgcgttgttcacggctctgattgatttcaagaggcacaaaacggacggctgtgatgatatcgcgtatattccaaccattgctccaaaggatgattgtaaagtgttcctttcacagaggtgcactcgattcccatctttttcatgaactaattgcaccttttatttaattctgatcctcaaattggtcccattggaccatggatgtaataggaccaattgcaagaatggggtccaatgtatttgttctttccatttatttttttt

SEQ ID NO: 474 - protein, 385 aa, Nicotiana tabacum
LIYMFGQEHKDHRRRMAPNFTPKALATYTVIQQKIIIKHFQSWLDEASQSPNKPITLRLLCRDMNLDTSQTVFVGPYLNEDSRKQFNVDYNYFNVGLMKLPVDLPGFAFRDARLAVGRLVDTLSVCAAQSQIKMRGDEEPTCLIDFWMQENFREIQEAKINGSQKPFEYTSKQLGGFLFDFLFAAQDASTSSLLWAMVLLESHPQVLERVRAEVAKFWSPESEEQPLTAEMLREMKYLEAVAREVVRIRTPAALVPHIAGEEFRLTDDYVIPKGTIVFPSVFDSSFQGFPEPEKFDPDRFTEERQEERVYKKNYLAFGAGPHGCVGQRYAINHLMLFIALFTALIDFKRHKTDGCDDIAYIPTIAPKDDCKVFLSQRCTRFPSFS

SEQ ID NO: 475 - DNA, 1204 bp, Nicotiana tabacum
tcattttcagtatgctatgttttgtctacttgtgttgatgtgtttcggggataagctcgacgaggctcaaatcaaacaaattgaaggtgttcagcgcaggttgctcctgggtttccgacgattcaatatactcaatttcttacccagagttgggaaaataatctttaggaatcgctggaaggaactaattgaactacgtcaagagcaagagaagatcttcattcctttgattgaagctcgaagtattagggccaaagaacaaaagcctgaggaagaagtggtggcttatgtggatacgctgttgaatttggaattgccaggggaaaacaggagcctcaattatggggaaatggttagcctctgcagtgaattcctaaacgccggaactgatacgacgtccaccgccttacagtgggttatggccaacttggtcaaaaacccttccattcagggaaaactatatcaagaaattgctagtgtagtgggagagaaacagagcaagttgacagaagaggtggtaaaggaggacgatctgcataaaatgccatacttgagagcagtgatctttcttaggcgacacccgcctggtcactttgtgctgccacatacggtgacagaggaagtagaactgaatggctatgttgtcccgaagaatgccaccatcaatttcatggttgcagacatgggtttggacccaaaggtgtgggaggatcccttggaattcaagccagagaggttcttaatggagggatcagataaggaagggttcgatataacaggaagtagagagatcaagatgatgccatttggcgctggtaggagaatttgcccaggctatgctttggctatgcttcatctagagtactttgtggctaatttggtttggcattttcgatgggaggctgtggagggagatgatgttgatctttcagaaaagctagaattcaccgttgtgatgaagaatccacttcgagctcgtatctgcctcagagttaactctatttgaatttggtaattactagttctttctatttgcattgttccctgttgatggacttcccccatatagtactggaagttagagggagaatgattattaatgccttgctgcaatattagcttagtagttagtagtgaatataattgaaactggatatttctatcttatgtgttgtacatttggttcattgcaaagggcgaattc

SEQ ID NO: 476 - protein, 334 aa, Nicotiana tabacum
HFQYAMFCLLVLMCFGDKLDEAQIKQIEGVQRRLLLGFRRFNILNFLPRVGKIIFRNRWKELIELRQEQEKIFIPLIEARSIRAKEQKPEEEVVAYVDTLLNLELPGENRSLNYGEMVSLCSEFLNAGTDTTSTALQWVMANLVKNPSIQGKLYQEIASVVGEKQSKLTEEVVKEDDLHKMPYLRAVIFLRRHPPGHFVLPHTVTEEVELNGYVVPKNATINFMVADMGLDPKVWEDPLEFKPERFLMEGSDKEGFDITGSREIKMMPFGAGRRICPGYALAMLHLEYFVANLVWHFRWEAVEGDDVDLSEKLEFTVVMKNPLRARICLRVNSI

SEQ ID NO: 477 - DNA, 1066 bp, Nicotiana tabacum
ataaatctaactgattggttagaagaattgaattttggtctgatcgtgaaaatgatcgctgggaaaaattatgaatccggtaaaggagatgaacaagtggaaagatttaagaatgcgtttaaggatttcatggttttatcaatggaatttgtattatgggatgcatttccaattccattatttaaatgggtggattttcaaggtcatattaaggcaatgaaaaggacatttaaggatatagattctgtttttcagaactggttagaggaacatattaataaaagagaaaaaatggaggttaatgcagaagggaatgaacaagatttcattgatgtggtgctttcaaaaatgagtaatgaatatcttggtgaaggttactctcgtgatactgtcattaaagcaacggtgtttagtttggtcttggatgcagcagacacagttgctcttcacataaattggggaatggcattattgataaacaatcaaaaggccttgacgaaagcacaagaagagatagacacaaaagttggtaaggacagatgggtagaagagagtgatattaaggatttggtatacctccaagctattgttaaagaagtgttacgattatatccaccaggacctttgttagtaccacacgaaaatgtagaagattgtgttgttagtggatatcacattcctaaagggacaagattattcgcaaacgtcatgaaactgcaacgtgatcctaaactctggtctgatcctgatactttcgatccagagagattcattgctactgatattgactttcgtggtcagtactataagtatatcccgtttggttctggaagacgatcttgtccagggatgacttatgcattgcaagtggaacacttaacaatggcacatttgatccaaggtttcaattacagaactccaaatgacgagcccttggatatgaaggaaggtgcaggcataactatacgtaaggtaaatcctgtggaactgataataacgcctcgcctggcacctgagctttattaaaacctaagatgtttcatcttggttgatcattgtttaatac

SEQ ID NO: 478 - protein, 341 aa, Nicotiana tabacum
INLTDWLEELNFGLIVKMIAGKNYESGKGDEQVERFKNAFKDFMVLSMEFVLWDAFPIPLFKWVDFQGHIKAMKRTFKDIDSVFQNWLEEHINKREKMEVNAEGNEQDFIDVVLSKMSNEYLGEGYSRDTVIKATVFSLVLDAADTVALHINWGMALLINNQKALTKAQEEIDTKVGKDRWVEESDIKDLVYLQAIVKEVLRLYPPGPLLVPHENVEDCVVSGYHIPKGTRLFANVMKLQRDPKLWSDPDTFDPERFIATDIDFRGQYYKYIPFGSGRRSCPGMTYALQVEHLTMAHLIQGFNYRTPNDEPLDMKEGAGITIRKVNPVELIITPRLAPELY

SEQ ID NO: 479 - DNA, 994 bp, Nicotiana tabacum
atgagaatggtagctggaaagagatattatggtgaagaggtagataacgaggaggcaaaccattttcgggagcttgtagaagaggttatttcatatgggggtgcatcaaatcccacggatttcatgcctgcaatatttcgttgctttttcaggagtatggagaagaatttggccaggcttggtagcaaaatggacgcgctcttgcaaggcttgattgatgaacaccgtcgtgataaaagcagaaattccatgattgatcatttgctttctctgcaagaatcagaaccagaatattactctgatcaaatcatcaaaggaataatattggtcatgctgaatgcggggactgaaacatcatctgtaacaatagaatgggcaatgtctcttttactcaatcatccagaggtgttggaaaaggccaaagctgaaatagacgaccatgtgggtaaagatcgtttagtggatgaagcagatttacccaagctgaaataccttcaaagtattatttcagagacacttcgattgtaccctgcaggaccaatgctagtgcctcatggatcatctgatgattgcactatcgctgggttgcacattccacgtggcacgatgctattggtgaatgcttgggccatccacagggacccattactttgggaggatccagagagcttcaagccagaaaggtttgaaggtgtgcaagtggaatcatggaagctattgccatttggaatgggaaggagagcgtgtccaggttctggacttgctcaacgtgtggttggtttagctttagcatctctagtgcagtgttttgagtggaaaagggtaagtgaagaggtggttgatttgactgaaggaaaaggtctcaccatgccaaaagctgagccactcatggctaggtgcgaagctcgtgatattcttcacaaagttgtttcagaaatatcctaacgtttcagagtgtttcttgcatttttttagtgctccatacctctagttt

SEQ ID NO: 480 - protein, 314 aa, Nicotiana tabacum
MRMVAGKRYYGEEVDNEEANHFRELVEEVISYGGASNPTDFMPAIFRCFFRSMEKNLARLGSKMDALLQGLIDEHRRDKSRNSMIDHLLSLQESEPEYYSDQIIKGIILVMLNAGTETSSVTIEWAMSLLLNHPEVLEKAKAEIDDHVGKDRLVDEADLPKLKYLQSIISETLRLYPAGPMLVPHGSSDDCTIAGLHIPRGTMLLVNAWAIHRDPLLWEDPESFKPERFEGVQVESWKLLPFGMGRRACPGSGLAQRVVGLALASLVQCFEWKRVSEEVVDLTEGKGLTMPKAEPLMARCEARDILHKVVSEIS

SEQ ID NO: 481 - DNA, 1030 bp, Nicotiana tabacum
ctcctttgccgcgatatgaacttggatacttcccagactgtcttcgttggtccatacttaaacgaagattccagaaagcagttcaatgttgactacaattacttcaatgttgggttaatgaaactccctgttgatttacctggtttcgccttcagagatgctaggttagctgttgggagactagtcgacacgctttccgtttgtgcagcacagagccaaattaagatgcgaggtgacgaagaacccacttgcttgattgatttttggatgcaggagaatttcagagagattcaggaagctaagattaatggttcacaaaagccgtttgagtataccagtaagcaacttggtggcttcttatttgacttcctctttgcggctcaagatgcttctacttcatctctgttatgggcaatggtgcttttggaatctcacccgcaagttctggagagagtccgagccgaagtggcgaaattctggtcgccagaatctgagcagccgttgacggcggagatgcttagggaaatgaagtacctggaggcggtggcgcgtgaggttgttaggatcagaactccggcgactttggtgccgcacattgccggcgaagaattccggttaactgatgattatgttattccaaaggggactattgttttcccttcggtttttgactcgtctttccaggggtttcctgaaccggagaagtttgacccggaccggttcacagaggagaggcaagaggaacgggtttacaagaagaattatctagcatttggagctgggccccatggatgtgtgggacagaggtatgctataaaccatttgatgctctttattgcgttgttcacggctctgattgatttcaagaggcacaaaacggacggctgtgatgatatcgcgtatattccaaccattgctccaaaggatgattgtaaagtgttcctttcacagaggtgcactcgattcccatctttttcatgaactaattgcgccttttatttaattctgatcctcaaattggtcccattgg

SEQ ID NO: 482 - protein, 326 aa, Nicotiana tabacum
LLCRDMNLDTSQTVFVGPYLNEDSRKQFNVDYNYFNVGLMKLPVDLPGFAFRDARLAVGRLVDTLSVCAAQSQIKMRGDEEPTCLIDFWMQENFREIQEAKINGSQKPFEYTSKQLGGFLFDFLFAAQDASTSSLLWAMVLLESHPQVLERVRAEVAKFWSPESEQPLTAEMLREMKYLEAVAREVVRIRTPATLVPHIAGEEFRLTDDYVIPKGTIVFPSVFDSSFQGFPEPEKFDPDRFTEERQEERVYKKNYLAFGAGPHGCVGQRYAINHLMLFIALFTALIDFKRHKTDGCDDIAYIPTIAPKDDCKVFLSQRCTRFPSFS

SEQ ID NO: 483 - DNA, 593 bp, Nicotiana tabacum
  misc_feature (80)..(80): n = a,t c, or g
gatcgtttagtggatgaagcagatttacccaagctgaaataccttcaaagtattatttcagagacacttcgattgtaccntgcagcaccaatgctagtgcctcatgaatcatctgatgattgcacggtcgctggcttccacattcctcgtggcacgatgctattggtgaatgcttgggccatccacagggaccccttactttgggaggacccagagagcttcaagccaaaaaggtttgaaggtgtgcaagccgaatcatggaagctattgccatttggaatgggaaggagagcgtgcccaggttctggacttgctcaatgtgtggttggtttagctttagcaactctagtgcagtgttttgagtggaaaagggtaagcgaagaggtggttgatttgacggaaggaaaaggtctcactatgccaaaacccgagccactcatggctaggtgcgaagctcgtgacatttttcacaaagttctttcagaaatatcttaatgttttgggagtctgaattaataatgtaaaatgtattttcattttctcatataatattgcactatctacatttctgatatgtcattgagatactccgg

SEQ ID NO: 484 - protein, 164 aa, Nicotiana tabacum
  VARIANT (27)..(27): Xaa = Leu, Pro, His, or Arg.
DRLVDEADLPKLKYLQSIISETLRLYXAAPMLVPHESSDDCTVAGFHIPRGTMLLVNAWAIHRDPLLWEDPESFKPKRFEGVQAESWKLLPFGMGRRACPGSGLAQCVVGLALATLVQCFEWKRVSEEVVDLTEGKGLTMPKPEPLMARCEARDIFHKVLSEIS

SEQ ID NO: 485 - DNA, 571 bp, Nicotiana tabacum
gaggacgatctgcataaaatgccatacttgagagcagtgatcttagagggtcttaggcgacacccgcctggtcactttgtgctgccacatacggtgacagaggaagtagaactgaatggctatgttgtcccgaagaatgccaccatcaatttcatggttgcagacatgggtttggacccaaaggtgtgggaggatcccttggaattcaagccagagaggttcttaatggagggatcagataaggaagggttcgatataacaggaagtagagagatcaagatgatgccatttggcgctggtaggagaatttgcccaggctatgctttggctatgcttcatctagagtactttgtggctaatttggtttggcattttcgatgggaggctgtggagggagatgatgttgatctttcagaaaagctagaattcaccgttgtgatgaagaatccacttcgagctcgtatctgcctcagagttaactctatttgaatttggtaattactagttctttctatttgcattgttccctgttgatggacttcccccatatagtactggaagttagagggag

SEQ ID NO: 486 - protein, 162 aa, Nicotiana tabacum
EDDLHKMPYLRAVILEGLRRHPPGHFVLPHTVTEEVELNGYVVPKNATINFMVADMGLDPKVWEDPLEFKPERFLMEGSDKEGFDITGSREIKMMPFGAGRRICPGYALAMLHLEYFVANLVWHFRWEAVEGDDVDLSEKLEFTVVMKNPLRARICLRVNSI

SEQ ID NO: 487 - DNA, 1294 bp, Nicotiana tabacum
gcagtgctgacttggcgtacgaagctttaattgaaaagggtcaaattttcgctacccgcccgagtgagaccccgacccgaaccattttcagttgcaacaagttcagtgtcaatgcagcaatttacgggccactttggcgatccctgagaagaaatatggtccaaaatatgcttagttcgagtagagtgaaagaatttcgtgattgtagagaaatggcaatggataagttgattgaaaggatacatgcagatgctaaggccaataacgatatcgtttgggtgctgaaaaacgcgcgtttcgcggtgttttatatacttttgactatgtgttttggtgttgaaatggatgagaaaatgattgaaaccgttgatcaaatgatgaaggatgtgctaatggagcttcatccaagaatagatgattttcttcctatattgagcttgtttgttggttataaacaacgtaagagagttcacgaagttcgcaagagacaaatagaaacacttgtccctttgatcgagaaacgtcgaagagcaatacaaaatcctgggtacgataagacagttgcctcgttttcgtacttagatactttatttgatgttaaggtcgaaggtacaaagtcaggaccaacgaatccggagcttgtaacactatgttcagagttcttgaatggtgggaccgacacaaccgctaccgcaatagagtgggccatagggagaatgatcgaaaatccaagcatacagaagagaatatacgaagagattagaaatacagtgggtgacagaaagattgacgaaaaggatatggataagatgccttatttaaacgccgttgtaaaggagcttttacgtaaacatcctcctacgtacgttacatttacccatgcagtaacggagccaacaacattgggtgggtatgacatacccacatatgctaatgtagagttttttgtacccgggatctcggatgacccgaaagtttggtctgatccggaaaagtttgacccggataggtttctatccgggcgggaggacgctgatataacgggtgtgaccggggtaaagatgatgccatttggggtcgggcggaggatttgtccgggcttgggcttggcaacggtgcatgtgaatttgatgttggcccgaatgattcaagaatttgaatggtccgcttacccggaaaataggaaagtggattttactgagaaattggaatttactgtggtgatgaaaaaccctttaagagctaaggtcaagccaagaatgcaagtggtgtaattcattaagattataagtcc

SEQ ID NO: 488 - protein, 423 aa, Nicotiana tabacum
SADLAYEALIEKGQIFATRPSETPTRTIFSCNKFSVNAAIYGPLWRSLRRNMVQNMLSSSRVKEFRDCREMAMDKLIERIHADAKANNDIVWVLKNARFAVFYILLTMCFGVEMDEKMIETVDQMMKDVLMELHPRIDDFLPILSLFVGYKQRKRVHEVRKRQIETLVPLIEKRRRAIQNPGYDKTVASFSYLDTLFDVKVEGTKSGPTNPELVTLCSEFLNGGTDTTATAIEWAIGRMIENPSIQKRIYEEIRNTVGDRKIDEKDMDKMPYLNAVVKELLRKHPPTYVTFTHAVTEPTTLGGYDIPTYANVEFFVPGISDDPKVWSDPEKFDPDRFLSGREDADITGVTGVKMMPFGVGRRICPGLGLATVHVNLMLARMIQEFEWSAYPENRKVDFTEKLEFTVVMKNPLRAKVKPRMQVV

SEQ ID NO: 489 - DNA, 1825 bp, Nicotiana tabacum
acagcatcttgtgctgccataataattactctagtggtgtgtatatggagagtgctgaattgggtttggttcagaccaaagaagctggaaaagctactgaggaaacaaggtctcaaaggcaattcctacaggattttgtatggggatatgaaggagctttctggtatgattaaggaagctaactccaaacccatgaatctttctgatgatattgccccaagattggtccctttctttcttgataccatcaagaaatatgggaaaaaatcctttgtatggttgggtccaaaaccgctggtttttgtcatggaccccgagcttataaaggaagtattctccaaaaactatctgtatcaaaagcctcattcaaatccattaaccaagttactggcacaaggacttgtaagccaagaggaagacaaatgggccaaacatagaaaaatcgtcactcctgccttccacctggagaagctaaaggtttgtaattgcaatggattctccgtaagcagttcatttttatcttttctttcatcgtaacagaaacttactcttgattgtgattcttttttgaggtacttgtttggaaccattttgtattcctaattacaaagtcggaacattttgaataagtgtcccttcattgactttctcttaaccatttcttaaacagcatatgcttccagctttttgtttgagctgtactgagatgctgagcaaatgggaagacattgttgcagttgagggctcacatgagatagatatatggcctggccttcaacaattaactagtgatgtgatctctcggacagcctttggcagtagctatgaagcaggtagaaggatatttgaacttcaaaaggaacaagctcaatttcttatggaagctatacgctccgtttatattccaggctggaggtttttgccaacaaagaggaacagaagaatgaaggaaattgaaaaggatgttcaagccttagttaaaggtattattgataaaagagtaaagtcaatgaaagcaggagaggtgaataatgaggatctgcttggtatattgctggaatctaattttaaagaaattgaacagcatggaaacaaggattttggaatgagcattgaagaagtcattcaagaatgcaagttattctattttgctggccaagaaactacatcagtgttgcttgtatggactctaatattgctgagcaggcatcaggattggcaagcactggccagagaagaggtgttgcaagtctttgggaatcagaaaccagattttgatggattaaatcgtctaaaaattgttacaatgatcttgtacgagtctttaaggctctatcccccagtagtgacacttacccgaaggcctaaggaagacactgtattaggagatgtatctctaccagcaggtgtgttaatctccttaccagtgatcttattgcatcacgacgaagagatatggggtaaagatgcaaagaagttcaagccagagagattcagagatggagtctcaagtgcaacaaagggtcaagtcacttttttcccatttacttggggtcccagaatatgcattggacaaaattttgccatgttagaagcaaagactactttggctatgatcctacaacgcttctcctttgaactgtctccatcttatgcacatgctcctcagtccataataactttgcaaccccagtatggtgctccacttattttgcataaaatatagtttattacttgtaagtagtgtctcgttttatgttaagcatgagtccaaaatgttaaggcttgtagaactgcaaaatgggaatgaatcactagtgaattc

SEQ ID NO: 490 - protein, 353 aa, Nicotiana tabacum
KQHMLPAFCLSCTEMLSKWEDIVAVEGSHEIDIWPGLQQLTSDVISRTAFGSSYEAGRRIFELQKEQAQFLMEAIRSVYIPGWRFLPTKRNRRMKEIEKDVQALVKGIIDKRVKSMKAGEVNNEDLLGILLESNFKEIEQHGNKDFGMSIEEVIQECKLFYFAGQETTSVLLVWTLILLSRHQDWQALAREEVLQVFGNQKPDFDGLNRLKIVTMILYESLRLYPPVVTLTRRPKEDTVLGDVSLPAGVLISLPVILLHHDEEIWGKDAKKFKPERFRDGVSSATKGQVTFFPFTWGPRICIGQNFAMLEAKTTLAMILQRFSFELSPSYAHAPQSIITLQPQYGAPLILHKI

SEQ ID NO: 491 - DNA, 920 bp, Nicotiana tabacum
catcaacgagcacaagaaaaatcttgcagctggcaagagtaatggtgcattaggaggtgaagatctaattgatgtcctactaagacttaagaatgatacaagtcttcaatttcccatcaccaacaacagtatcaaagctgttattgttgacatgtttgctgccggaacggaaacttcatcaacaacaactgtatgggctatggctgaaatgatgaagaatccaagtgtattcaccaaagctcaagcagaagtgcgagaagcctttagggacaaagtatcttttgatgaaaacgatgtggaggagctgaaatacttaaagttagtcattaaagaaactttgagacttcatccaccctctccacttttggtcccaagagaatgcagggaagacacagatataaacggctacactattcctgcgaagaccaaagttatggttaatgtttgggcattgggaagagatccaaaatattgggatgacgccgaaagctttaagccagagagatttgagcaatgctctatggatttttttggtaataattttgagtttcttccctttggtggtggacggagaatttgtcctggaatgtcatttggtttagctaatctttacttgccattggcccaattgctgtatcacttcgactggaaactcccaactggaatcaagccaagagacttggacttgactgaattatctggaataactattgctagaaagggtgacctttacttaaatgccactccttatcaaccgtcgagactaatttaatattggcatcaactttttaaattttcttcatcaacctcattattaatgtacaataatctttcttctgttgttgtaggctttatcgatttccaatacatgtattctttatttaaaaatgtatcacattccatgtataaaaaaaaaaaaa

SEQ ID NO: 492 - protein, 256 aa, Nicotiana tabacum
INEHKKNLAAGKSNGALGGEDLIDVLLRLKNDTSLQFPITNNSIKAVIVDMFAAGTETSSTTTVWAMAEMMKNPSVFTKAQAEVREAFRDKVSFDENDVEELKYLKLVIKETLRLHPPSPLLVPRECREDTDINGYTIPAKTKVMVNVWALGRDPKYWDDAESFKPERFEQCSMDFFGNNFEFLPFGGGRRICPGMSFGLANLYLPLAQLLYHFDWKLPTGIKPRDLDLTELSGITIARKGDLYLNATPYQPSRLI

SEQ ID NO: 493 - DNA, 1394 bp, Nicotiana tabacum
aaataatggattatcatatttctttccattttcaagctcttttagggcttttagcctttgtgttcttgtctattatcttatggagaagaacactcacttcaagaaaattagcccctgaaatcccaggggcatggcctattataggccatcttcgtcagctgagtggtactgataagaatatcccatttccccgaatattgggcgctttggcagataaatatggacctgtcttcacactgagaatagggatgtacccctatttgattgtcaacaattgggaagcagctaaggattgtctcacaacgcatgataaggactccgctgcccgaccaacttctatggctggtgaaagcatcgggtacaagtatgcgaggtttacttatgctaattttggtccttattataaccaagtgcgcaaactagccctacaacatgtactctcgagtactaaactcgagaaaatgaaacacatacgtgtttctgaattggaaactagcatcaaagaattatattctttgacgctgggcaaaaacaacatgcaaaaagtgaatataagtaaatggtttgaacaattgactttaaacataatcgtgaagacaatttgtggcaagagatatagcaacatagaggaggatgaagaggcacaacgtttcagaaaggcatttaagggcatcatgtttgttgtagggcaaattgttttatatgacgcaattccattcccattgttcaaatactttgatttccaaggtcatatacaattgatgaacaaaatttataaagacttagattctattcttcaaggatggttggatgatcatatgatgaacaaggatgtaaacaataaggatcaagatgccatagatgccatgcttaaggtaacacaacttaatgaattcaaagcctatggtttttctcaggccactgtgatcaagtcgacagtcttgagtttgatcttagatggaaatgacacaaccgctgttcatttgatatgggtaatgtccttattactgaacaatccacatgttatgaaacaaggccaagaagagatagacatgaaagtgggtaaagagaggtggattgaagatactgacataaaaaatttagtgtaccttcaggctatcgttaaagagacattgcgcttgtatccacctgttccttttcttttaccacacgaagcagtgcaagattgtaaagtgactggttaccacattcctaaaggtactcgtctatatatcaatgcgtggaaagtacatcgcgatcctgaaatttggtcagagcccgaaaagtttatgcccaatagattcttgactagcaaagcaaatatagatgctcgcggtcaaaattttgaatttataccgtttggttctgggagacggtcatgtccagggataggt

SEQ ID NO: 494 - protein, 463 aa, Nicotiana tabacum
MDYHISFHFQALLGLLAFVFLSIILWRRTLTSRKLAPEIPGAWPIIGHLRQLSGTDKNIPFPRILGALADKYGPVFTLRIGMYPYLIVNNWEAAKDCLTTHDKDSAARPTSMAGESIGYKYARFTYANFGPYYNQVRKLALQHVLSSTKLEKMKHIRVSELETSIKELYSLTLGKNNMQKVNISKWFEQLTLNIIVKTICGKRYSNIEEDEEAQRFRKAFKGIMFVVGQIVLYDAIPFPLFKYFDFQGHIQLMNKIYKDLDSILQGWLDDHMMNKDVNNKDQDAIDAMLKVTQLNEFKAYGFSQATVIKSTVLSLILDGNDTTAVHLIWVMSLLLNNPHVMKQGQEEIDMKVGKERWIEDTDIKNLVYLQAIVKETLRLYPPVPFLLPHEAVQDCKVTGYHIPKGTRLYINAWKVHRDPEIWSEPEKFMPNRFLTSKANIDARGQNFEFIPFGSGRRSCPGIG

SEQ ID NO: 495 - DNA, 480 bp, Nicotiana tabacum
aataggccaaaatatatggaaggagatattgttgatcttttgctacaattgaagaaagaacaatcaacaccaattgatcttactttggaggatataaaaggaattctcatgaatgtgttggttgcaggatcagacactagtgcagctgctactgtttgggcaatgacagccttgataaaaaatccaaaaaccatgaaaaaagttcaatcagaaatcagaaaatcaatagggaagaaaggaattgtaaatgaagaagatgtccaaaacatgccttatctcaaagcagtgataaaggaaatatttagattgtatccaccagttccacttctagttccaagagaatcaatggaaaaaaccatattagaaggttatgaaattcggccaggaaccatagttcatgttaacgcttgggctattgcgagggatcctgaaatatgggaaaatccagaagaatttatacctgagagattacttgaatag

SEQ ID NO: 496 - protein, 159 aa, Nicotiana tabacum
NRPKYMEGDIVDLLLQLKKEQSTPIDLTLEDIKGILMNVLVAGSDTSAAATVWAMTALIKNPKTMKKVQSEIRKSIGKKGIVNEEDVQNMPYLKAVIKEIFRLYPPVPLLVPRESMEKTILEGYEIRPGTIVHVNAWAIARDPEIWENPEEFIPERLLE

SEQ ID NO: 497 - DNA, 736 bp, Nicotiana tabacum
gcaagttctttcactagttgtaatagtcctatacattcttcaacaattacacaacaaattcatgaaaaagaaaaagaaacttcctccaggtccaaaagggtttccaattattggaaatctatttatgattggcaaaaacctacatcaagatctttatcaaatagccaaaaaacatggtcctataatgagtatgagatttggtctagttcctatcattgttgcttcatctcctcatgctgctgaactattcttgaaaaaacatgatcttgtttttgctagtagaccatataatacagctgctcaatatattggatataatcaaagaaatcttacttttggtaaatatggtccttattggcgaaatatgcgaaaattatgtacgttagaattgcttagtagtctcaagatcaattcatttcaggccatgagaaaacaagaaattggaaattttgtgacttttctcaatagagcagcttctaatggtattgaggttgatattagtgctaaacttgcttcattaagtgcaaatatggcttgtttaatggtatttgggaagaaatatatggatgaagaatttgatgaaaggggttttaaagatgtaattcaagagacattagttataactgcaacaccaaatattggtgagttttttccttttcttgataggtttgatttgcagggatttgttccacgtatgaaaaaattggcaaagatttttgatgattttttcgagaaa

SEQ ID NO: 498 - protein, 245 aa, Nicotiana tabacum
QVLSLVVIVLYILQQLHNKFMKKKKKLPPGPKGFPIIGNLFMIGKNLHQDLYQIAKKHGPIMSMRFGLVPIIVASSPHAAELFLKKHDLVFASRPYNTAAQYIGYNQRNLTFGKYGPYWRNMRKLCTLELLSSLKINSFQAMRKQEIGNFVTFLNRAASNGIEVDISAKLASLSANMACLMVFGKKYMDEEFDERGFKDVIQETLVITATPNIGEFFPFLDRFDLQGFVPRMKKLAKIFDDFFEK

SEQ ID NO: 499 - DNA, 509 bp, Nicotiana tabacum
cgtgaatccattgaagattgtattgttgatggttttgatatacctaaaggttcaagaattttagtaaatacttgggcaattggaagagatccagaagcctggcccgaacccgagaagttcaagccagaaaggtttgttggtagcaacatcgatcttaggggacgtgattttcaacttttaccatttggctcagggagaaggagttgccccggattacaattagggctcaccattgttcgcttggtgttagcgcaattggttcattgctttgattgggaactaccaaatggtatggcgccagaagatttagatatgactgagaaatttggtttagttacagctagagctcaacatttagttgctattcctacttatcaattgcatgtgtagttgatgtgaatcttcctagaagcttaattaagtaaaaatgaagatctttgtcctctatatttttcattgtatgacaaaatttggtaacatttactacatatggagctaccactaaaaaa

SEQ ID NO: 500 - protein, 129 aa, Nicotiana tabacum
RESIEDCIVDGFDIPKGSRILVNTWAIGRDPEAWPEPEKFKPERFVGSNIDLRGRDFQLLPFGSGRRSCPGLQLGLTIVRLVLAQLVHCFDWELPNGMAPEDLDMTEKFGLVTARAQHLVAIPTYQLHV

SEQ ID NO: 501 - DNA, 532 bp, Nicotiana tabacum
tcgacgactataatttgggcattagctgaaatgatgaagaaaccaagtgttttagcaaaggcacaagctgaagtaaggcaagctttgaaggagaaaaaaggttttcaacagattgatcttgatgagctaaaatatctcaagttagtaatcaaagaaaccttaagaatgcaccctccaattcctctattagttcctagagaatgtatggaggatacaaagattgatggttacaatatacctttcaaaacaagagtcatagttaatgcatgggcaatcggacgagatccagaaagttgggatgaccccgaaagctttatgccagagagatttgagaatagttctattgactttcttggaaatcatcatcagtttataccatttggtgcaggaagaaggatttgtccgggaatgctatttggtttagctaatgttggacaacctttagctcagttactttatcacttcgattggaaactccctaatggacaaagtcatgagaatttcgacatgactgagtcacctggaatttctg

SEQ ID NO: 502 - protein, 177 aa, Nicotiana tabacum
STTIIWALAEMMKKPSVLAKAQAEVRQALKEKKGFQQIDLDELKYLKLVIKETLRMHPPIPLLVPRECMEDTKIDGYNIPFKTRVIVNAWAIGRDPESWDDPESFMPERFENSSIDFLGNHHQFIPFGAGRRICPGMLFGLANVGQPLAQLLYHFDWKLPNGQSHENFDMTESPGIS

SEQ ID NO: 503 - DNA, 1518 bp, Nicotiana tabacum
tgctctttctactctttgtagcccttcctttcattcttatttttcttcttcctaaattcaaaaatggtggaaataacagattgccaccaggtcctataggtttaccattcattggaaatttgcatcaatacgatagtataactcctcatatctatttttggaaactttcaaaaaaatatggcaaaatcttctcattaaaacttgcttctactaatgtggtagtagtttcttcagcaaaattagcaaaagaagtattgaaaaaacaagatttaatattttgtagtagaccatctattcttggccaacaaaaactgtcttattatggtcgtgatattgcttttaatgattattggagagaaatgagaaaaatttgtgttcttcatctttttagtttaaaaaaagttcaattatttagtccaattcgtgaagatgaagtttttagaatgattaagaaaatatcaaaacaagcttctacttcacaaattattaatctgagtaatttaatgatttcattaacaagtacaattatttgtagagttgcttttggtgttaggattgaagaagaagcacatgcaaggaagagatttgattttcttttggccgaggcacaagaaatgatggctagtttctttgtatctgatttttttccctttttaagttggattgataaattaagtggattgacatatagacttgagaggaatttcaaggatttggataatttttatgaagaactcattgagcaacatcaaaatcctaataagccaaaatatatggaaggagatattgttgatcttttgctacaattgaagaaagagaaattaacaccacttgatctcactatggaagatataaaaggaattctcatgaatgtgttagttgcaggatcagacactagtgcagctgctactgtttgggcaatgacagccttgataaagaatcctaaagccatggaaaaagttcaattagaaatcagaaaatcagttgggaagaaaggcattgtaaatgaagaagatgtccaaaacatcccttattttaaagcagtgataaaggaaatatttagattgtatccaccagctccacttttagttccaagagaatcaatggaaaaaaccatattagaaggttatgaaattcggccaagaaccatagttcatgttaacgcttgggctatagcaagggatcctgaaatatgggaaaatccagatgaatttatacctgagagatttttgaatagcagtatcgattacaagggtcaagattttgggttacttccatttggtgcaggcagaagaggttgcccaggtattgcacttggggttgcatccatggaacttgctttgtcaaatcttctttatgcatttgattgggagttgccttatggagtgaaaaaagaagacatcgacacaaacgttaggcctggaattgccatgcacaagaaaaacgaactttgccttgtcccaaaaaattatttataaattatattgggacgtggatctcatgctagttctgtgaagg

SEQ ID NO: 504 - protein, 491 aa, Nicotiana tabacum
LFLLFVALPFILIFLLPKFKNGGNNRLPPGPIGLPFIGNLHQYDSITPHIYFWKLSKKYGKIFSLKLASTNVVVVSSAKLAKEVLKKQDLIFCSRPSILGQQKLSYYGRDIAFNDYWREMRKICVLHLFSLKKVQLFSPIREDEVFRMIKKISKQASTSQIINLSNLMISLTSTIICRVAFGVRIEEEAHARKRFDFLLAEAQEMMASFFVSDFFPFLSWIDKLSGLTYRLERNFKDLDNFYEELIEQHQNPNKPKYMEGDIVDLLLQLKKEKLTPLDLTMEDIKGILMNVLVAGSDTSAAATVWAMTALIKNPKAMEKVQLEIRKSVGKKGIVNEEDVQNIPYFKAVIKEIFRLYPPAPLLVPRESMEKTILEGYEIRPRTIVHVNAWAIARDPEIWENPDEFIPERFLNSSIDYKGQDFGLLPFGAGRRGCPGIALGVASMELALSNLLYAFDWELPYGVKKEDIDTNVRPGIAMHKKNELCLVPKNYL

SEQ ID NO: 505 - DNA, 987 bp, Nicotiana tabacum
ctcattatccatcacctaaaatggagaattcttgggtttttctagccttggcagggctatctgcattagcttttctctgtaaaataatcacctgtcgaagaccggttaaccggaaaataccaccaggtccaaaaccatggcccatcattggcaatttgaacctacttggtcctataccacatcaatcttttgacttgctttccaaaaaatatggagagttgatgctgctgaaatttggctccaggccagttcttgttgcttcatctgctgaaatggcaaaacagtttttaaaagtacatgatgctaatttcgcctcccgtcctatgctagctggtggaaagtatacaagctataactattgtgacatgacatgggcaccctatggtccctattggcgccaagcacgacgaatttaccttaaccagatatttactccgaaaaggctagactcgttcgagtacattcgtgttgaagaaaggcaggccttgatttcccagctgaattcccttgctggaaagccattttttctcaaagaccatttgtcgcgatttagcctctgcagcatgacaaggatggttttgagcaacaagtattttggtgaatcaacagttagagtagaagatttgcagtacctggtagatcaatggttcttacttaatggtgctttcaacattggagattggattccatggctcagcttcttggacctacaaggctatgtgaaacaaatgaaggctttgaaaagaacttttgataagttccacaacattgtgctagatgatcacagggctaagaagaatgcagagaagaactttgtcccaaaagacatggttgatgtcttgttgaagatggctgaagatcctaatctggaagtcaaactcactaatgactgtgtcaaagggttaatgcaggatttactaactggaggaacagatagcttaacagcagcagtgcaatgggcatttcaagaacttcttagacagccaa

SEQ ID NO: 506 - protein, 322 aa, Nicotiana tabacum
MENSWVFLALAGLSALAFLCKIITCRRPVNRKIPPGPKPWPIIGNLNLLGPIPHQSFDLLSKKYGELMLLKFGSRPVLVASSAEMAKQFLKVHDANFASRPMLAGGKYTSYNYCDMTWAPYGPYWRQARRIYLNQIFTPKRLDSFEYIRVEERQALISQLNSLAGKPFFLKDHLSRFSLCSMTRMVLSNKYFGESTVRVEDLQYLVDQWFLLNGAFNIGDWIPWLSFLDLQGYVKQMKALKRTFDKFHNIVLDDHRAKKNAEKNFVPKDMVDVLLKMAEDPNLEVKLTNDCVKGLMQDLLTGGTDSLTAAVQWAFQELLRQP

SEQ ID NO: 507 - DNA, 980 bp, Nicotiana tabacum
atgatcgctgggaaaaattatggatccggtaaaggagatgaacaagtggagagatttgggaaagcgtttaaggattttataattttatcaatggagtttgtgttatgggatgcttttccaattccattgttcaaatgggtggatcttcaaggccatgttaaggccatgaaaaggacatttaaggatatagattctgtttttcagaattggttagaggaacatgtcaagaaaaaagaaaaaatggaggttaatgcagaaggaaatgaacaagatttcattgatgtggtgctttcaaaaatgagtaatgaatatcttgatgaaggctactctcgtgatactgtcataaaagcaacagtgtttagtttagtcttggatgctgcggacacagttgctcttcacatgaattggggaatggcattattgacaaacaatcaacatgccttgaagaaagcgcaagaagagatagataaaaaagttggtaaggatagatgggtagaagagagtgatattaaggatttggtatacctccaaactattgttaaagaagtgttacgattatatccaccgggacctttattagtaccccatgaaaatgtagaggattgtgttgttagtggatatcacattcctaaagggactagactattcgcgaacgttatgaaattacagcgcgatcctaaactctggtcaaatcctgataagttcgatccagagagatttttcgctgctgatattgactttcgtggtcaacactatgagtttatcccatttggttctggaagacgatcttgtccggggatgacttatgcaatgcaagtggaacacctaacaatcgcacacttgatccagggtttcaattacaaaactccaaatgacgagcccttggatatgaaggaaggtgcaggattaactatacgtaaggtaaatcctatagaagtggtaattacgcctcgcctgacacctgagctttattaaaatct

SEQ ID NO: 508 - protein, 324 aa, Nicotiana tabacum
MIAGKNYGSGKGDEQVERFGKAFKDFIILSMEFVLWDAFPIPLFKWVDLQGHVKAMKRTFKDIDSVFQNWLEEHVKKKEKMEVNAEGNEQDFIDVVLSKMSNEYLDEGYSRDTVIKATVFSLVLDAADTVALHMNWGMALLTNNQHALKKAQEEIDKKVGKDRWVEESDIKDLVYLQTIVKEVLRLYPPGPLLVPHENVEDCVVSGYHIPKGTRLFANVMKLQRDPKLWSNPDKFDPERFFAADIDFRGQHYEFIPFGSGRRSCPGMTYAMQVEHLTIAHLIQGFNYKTPNDEPLDMKEGAGLTIRKVNPIEVVITPRLTPELY

SEQ ID NO: 509 - DNA, 513 bp, Nicotiana tabacum
gcagtgatcttagaaggtcttaggcgacacccgcccggtcactttgtgctgccacatacggtgacagaggaagcagaactgaacggctacgtcgtcccaaagaatgccaccatcaatttcatggttgccgacatgggtttggacccaaaggtgtgggaggatcccttggaatttaagccagagaggttcttaatggagggatcagataaggaagggtttgatataacaggaagtagagagatcaagatgatgccatttggagctggtaggagaatatgtcctggctatgctttggctatgcttcatttggaatactttgtggctaatttggtttggcattttcgatgggatgctgtggagggagatgatgttgatctttcagagaagctagaattcaccgttgtgatgaagaatcctctacgagctcgtatctgccctagagttaactctgtttgaatttggtaattactagtagttctttctatttgcattgttccctgttgatggacttcc

SEQ ID NO: 510 - protein, 151 aa, Nicotiana tabacum
AVILEGLRRHPPGHFVLPHTVTEEAELNGYVVPKNATINFMVADMGLDPKVWEDPLEFKPERFLMEGSDKEGFDITGSREIKMMPFGAGRRICPGYALAMLHLEYFVANLVWHFRWDAVEGDDVDLSEKLEFTVVMKNPLRARICPRVNSV

SEQ ID NO: 511 - DNA, 419 bp, Nicotiana tabacum
ttcgcatggataggcccagaacccaggattttcgtaatgaaaccagaattgataaaggaaatagtaacgaacaacaccatcttcaaaaaaccaaaaccagccccacttgtccagcttcttgttagtggcatctcaagttatgaggacgacaaatgggctaagcacagaaaaattcttaacactgcattttacgccgagaagttgaagtgtatgctgccggcaatgcacacaagctgtgaagatatgatcaacaagtgggaaattctactctccgaaaacaaatcctgcgaattggacgtgcatccatattttgaagattttaccagtgatgtgatttcaagaacagcatttggaagtagttatgcagaaggaacaagaatatttcatcttcaaaaagaactagctgaactcacacgcca

SEQ ID NO: 512 - protein, 139 aa, Nicotiana tabacum
FAWIGPEPRIFVMKPELIKEIVTNNTIFKKPKPAPLVQLLVSGISSYEDDKWAKHRKILNTAFYAEKLKCMLPAMHTSCEDMINKWEILLSENKSCELDVHPYFEDFTSDVISRTAFGSSYAEGTRIFHLQKELAELTR

SEQ ID NO: 513 - DNA, 557 bp, Nicotiana tabacum
atgagtttagtaaaatcagtagtgtatgaagtattaagaattgaacctccagttccattccaatatggtaaagccaaagaagatatcataatccaaagccatgattcaactttcttagtcaagaaaggtgaaatgatctttggatatcagccttttgctacaaaagatccaaagatttttgacaaaccagaggagtttattccggagaggttcatggccgaaggggaaaaattattaaagtatgtgtattggtcaaatgcaagagagacagatgatccaacggtggacgacaaacaatgcccagcgaaaaatcttgtcgtgcttttgtgcaggttgatgttggtggaggttttcatgcgttacgacacattcacagtggagtcaacaaagctctttcttgggtcatcagtaacgttcacgactctggaaaaagcgacatgagtttcagatatcttaattgtaggctgcaaataataatgtggtcattctgcaaattattgtacttgtgctgatgtacttgacttcgagtggatataataatgcactgtttttagaaa

SEQ ID NO: 514 - protein, 146 aa, Nicotiana tabacum
MSLVKSVVYEVLRIEPPVPFQYGKAKEDIIIQSHDSTFLVKKGEMIFGYQPFATKDPKIFDKPEEFIPERFMAEGEKLLKYVYWSNARETDDPTVDDKQCPAKNLVVLLCRLMLVEVFMRYDTFTVESTKLFLGSSVTFTTLEKAT

SEQ ID NO: 515 - DNA, 389 bp, Nicotiana tabacum
gttggaacaagtagttggcacaaacagaatggtggaagaatcagatttggaaaaattagattacttagatatggttgtaaaagaaggttttaggcttcaccctgttgcaccactattacttcctcgtgaatccattgaagattgtattgttgatggttttgatatacctaaaggttcaagaattttagtaaatacttgggcaattggaagagatccagaagcctggcccgaacccgagaagttcaagccagaaaggtttgttggtagcaacatcgatcttaggggacgtgattttcaacttttaccatttggctcagggagaaggagttgccccggattacaattagggctcaccattgttcgcttggtgttagcgcaattggttcatt

SEQ ID NO: 516 - protein, 129 aa, Nicotiana tabacum
LEQVVGTNRMVEESDLEKLDYLDMVVKEGFRLHPVAPLLLPRESIEDCIVDGFDIPKGSRILVNTWAIGRDPEAWPEPEKFKPERFVGSNIDLRGRDFQLLPFGSGRRSCPGLQLGLTIVRLVLAQLVH

SEQ ID NO: 517 - DNA, 405 bp, Nicotiana tabacum
ctatatggagacacaaaggagatggctgagatgaccaaagaagccaagtttaaacccattaaactcactgatgatattctccctcggatcttccctttctaccatcatactttcaacaaatatggtaaccattgtttcgcatggataggcccagaacccaggattttcgtaatgaaaccagaattgataaaggaaatagtaacgaacaacaccatcttcaaaaaaccaaaaccagccccacttgtccagcttcttgttagtggcatctcaagttatgaggacgacaaatgggctaagcacggaaaaattcttaacactgcattttacgccgagaagttgaagtgtatgctgccggcaatgcacacaagctgtgaagatatgatcaacaagtgggaaattctactc

SEQ ID NO: 518 - protein, 135 aa, Nicotiana tabacum
LYGDTKEMAEMTKEAKFKPIKLTDDILPRIFPFYHHTFNKYGNHCFAWIGPEPRIFVMKPELIKEIVTNNTIFKKPKPAPLVQLLVSGISSYEDDKWAKHGKILNTAFYAEKLKCMLPAMHTSCEDMINKWEILL

SEQ ID NO: 519 - DNA, 445 bp, Nicotiana tabacum
tacgtacgttacatttacccatgcagtaacggagccaacaacattgggtgggtatgacatacccacatatgctaatgtagagttttttgtacccgggatctcggatgacccgaaagtttggtctgatccggaaaagtttgacccggataggtttctatccgggcgggaggacgctgatataacgggtgtgaccggggtaaagatgatgccatttggggtcgggcggaggatttgtccgggcttgggcttggcaacggtgcatgtgaatttgatgttggcccgaatgattcaagaatttgaatggtccgcttacccggaaaataggaaagtggattttactgagaaattggaatttactgtggtgatgaaaaatcctttaagagctaaggtcaagccaagaatgcaagtggtgtaattcattaagattataagtccaaaaataagc

SEQ ID NO: 520 - protein, 137 aa, Nicotiana tabacum
TYVTFTHAVTEPTTLGGYDIPTYANVEFFVPGISDDPKVWSDPEKFDPDRFLSGREDADITGVTGVKMMPFGVGRRICPGLGLATVHVNLMLARMIQEFEWSAYPENRKVDFTEKLEFTVVMKNPLRAKVKPRMQVV

SEQ ID NO: 521 - DNA, 574 bp, Nicotiana tabacum
agaagagatagacatgaaagtgggtaaagagaggtggattgaagatactgacataaaaaatttagtgtaccttcaggctatcgttaaagagacattgcgcttgtatccacctgttccttttcttttaccacacgaagcagtgcaagattgtaaagtgactggttaccacattcctaaaggtactcgtctatatatcaatgcgtggaaagtacatcgcgatcctgaaatttggtcagagcccgaaaagtttatgcccaatagattcttgactagcaaagcaaatatagatgctcgcggtcaaaattttgaatttataccgtttggttctgggagacggtcatgtccagggataggttttgcgactttagtgacacatctgacttttggtcgcttgcttcaaggttttgattttagtaagccatcaaacacgccaattgacatgacagaaggcgtaggcgttactttgcctaaggttaatcaagttgaagttctaattatccctcgtttaccttctaagctttatttattttgaaagtgcaaatcatcaatcatgggttgagtaattagtgatact

SEQ ID NO: 522 - protein, 176 aa, Nicotiana tabacum
EEIDMKVGKERWIEDTDIKNLVYLQAIVKETLRLYPPVPFLLPHEAVQDCKVTGYHIPKGTRLYINAWKVHRDPEIWSEPEKFMPNRFLTSKANIDARGQNFEFIPFGSGRRSCPGIGFATLVTHLTFGRLLQGFDFSKPSNTPIDMTEGVGVTLPKVNQVEVLIIPRLPSKLYLF

SEQ ID NO: 523 - DNA, 1137 bp, Nicotiana tabacum
aacatttggcaatatagtcttcctcctcagttcttgcctcctgttccttagaaataatggattatcatatttctttccatcttccaactctttttgggctttttgcctttgtgttcttgtctattatcttatggagaagaacactcaattcaagaagattagcccctgaaatcccaggggcatggcctattataggccatcttcgtcagctgagtggtactgataagaatatcccatttccccgaatattgggcgctttggcagataaatatggacctgtcttcacactgagaatagggatgtacccctatttgattgtcaacaattgggaagcagctaaggattgtctcacaacgcatgataaggacttcgctgcccgaccaacttctatggctggtgaaagcatcgggtacaagtatgcgaggtttacttatgctaattttggtccttattataaccaagtgcgcaaactagccctacaacatgtactctcgagtactaaactcgagaaaatgaaacacatacgtgtttctgaattggaaactagcatcaaagaattatattctttgacgctgggcaaaaacaacatgcaaaaagtgaatataagtaaatggtttgaacaattgactttaaacataatcgtgaagacaatttgtggcaagagatatagcaacatagaggaggatgaagaggcacaacgtttcagaaaggcatttaagggcatcatgtttgttgtagggcaaattgttttatatgacgcaattccattcccattgttcaaatactttgatttccaaggtcatatacaattgatgaacaaaatttataaagacttagattctattcttcaaggatggttggatgatcatatgatgaacaaggatgtaaacaataaggatcaagatgccatagatgccatgcttaaggtaacacaacttaatgaattcaaagcctatggtttttctcaggccactgtgatcaagtcgacagtcttgagtttgatcttagatggaaatgacacaaccgctgttcatttgatatgggtaatgtccttattactgaacaatccacatgttatgaaacaaggccaagaagagatagacatgaaagtgggtaaagagaggtggattgaagata

SEQ ID NO: 524 - protein, 360 aa, Nicotiana tabacum
MDYHISFHLPTLFGLFAFVFLSIILWRRTLNSRRLAPEIPGAWPIIGHLRQLSGTDKNIPFPRILGALADKYGPVFTLRIGMYPYLIVNNWEAAKDCLTTHDKDFAARPTSMAGESIGYKYARFTYANFGPYYNQVRKLALQHVLSSTKLEKMKHIRVSELETSIKELYSLTLGKNNMQKVNISKWFEQLTLNIIVKTICGKRYSNIEEDEEAQRFRKAFKGIMFVVGQIVLYDAIPFPLFKYFDFQGHIQLMNKIYKDLDSILQGWLDDHMMNKDVNNKDQDAIDAMLKVTQLNEFKAYGFSQATVIKSTVLSLILDGNDTTAVHLIWVMSLLLNNPHVMKQGQEEIDMKVGKERWIED

SEQ ID NO: 525 - DNA, 254 bp, Nicotiana tabacum
gtaaatgaagaagatgtccaaaacatcccttattttaaagcagtgataaaggaaatatttagattgtatccaccagctccacttttagttccaagagaatcaatggaaaaaaccatattagaaggttatgaaattcggccaagagccatagttcatgttaacgcttgggctatagcaagggatcctgaaatatgggaaaatccagatgaatttatacctgagagatttttgaatagcagtatcgattacagggt

SEQ ID NO: 526 - protein, 84 aa, Nicotiana tabacum
VNEEDVQNIPYFKAVIKEIFRLYPPAPLLVPRESMEKTILEGYEIRPRAIVHVNAWAIARDPEIWENPDEFIPERFLNSSIDYR

SEQ ID NO: 527 - DNA, 519 bp, Nicotiana tabacum
aagagtaatggtgcattaggaggtgaagatctaattgatgtcctactaagacttaagaatgatacaagtcttcaatttcccatcaccaacaacaatatcaaagctgttattgttgacatgtttgctgccggaacggaaacttcatcaacaacaactgtatgggctatggctgaaatgatgaagaatccaagtgtattcaccaaagctcaagcagaagtgcgagaagcctttagggacaaagtatcttttgatgaaaacgatgtggaggagctgaaatacttaaagttagtcattaaagaaactttgagacttcatccaccctctccacttttggtcccaagagaatgcagggaagacacagatataaacggctacactattcctgcgaagaccaaagttatggttaatgtttgggcattgggaagagatccaaaatattgggatgacgccgaaagctttaagccagagagatttgagcaatgctctatggatttttttggtaataattttgagtttctt

SEQ ID NO: 528 - protein, 174 aa, Nicotiana tabacum
KSNGALGGEDLIDVLLRLKNDTSLQFPITNNNIKAVIVDMFAAGTETSSTTTVWAMAEMMKNPSVFTKAQAEVREAFRDKVSFDENDVEELKYLKLVIKETLRLHPPSPLLVPRECREDTDINGYTIPAKTKVMVNVWALGRDPKYWDDAESFKPERFEQCSMDFFGNNFEFLP

SEQ ID NO: 529 - DNA, 340 bp, Nicotiana tabacum
ttaaaccaccctgaaactctgaagaaagcacaagctgaaattgatgaacatataggacatgaacgtttagtggacgagtcggacatcaacaacctaccttacctacgttgtataatcaacgagacattccgaatgtaccctgcaggaccactactagtcccacacgagtcgtcagaggaaaccaccgtaggaggctaccgtgtacccggaggaaccatgttacttgtgaatttgtgggctattcacaatgatccaaagctatgggatgaaccaagaaagtttaagccagaaagatttgaaggactagaaggtgttagagatggttacaaaatgatgccct

SEQ ID NO: 530 - protein, 113 aa, Nicotiana tabacum
LNHPETLKKAQAEIDEHIGHERLVDESDINNLPYLRCIINETFRMYPAGPLLVPHESSEETTVGGYRVPGGTMLLVNLWAIHNDPKLWDEPRKFKPERFEGLEGVRDGYKMMP

SEQ ID NO: 531 - DNA, 218 bp, Nicotiana tabacum
gtcaggtttcatcctatagctccagtattagcacctagagaatcaagggaagagtgtgagattaatggctatgttataccaaaaggcacaatggcccttgtgaatttttgggcaatttctagggatccaaattattggtcaaatcctgaaacatttgatccagagagatttaatgaaagtcaccttgattttactggagctcatttcgagtttacgcc

SEQ ID NO: 532 - protein, 72 aa, Nicotiana tabacum
VRFHPIAPVLAPRESREECEINGYVIPKGTMALVNFWAISRDPNYWSNPETFDPERFNESHLDFTGAHFEFT

SEQ ID NO: 533 - DNA, 369 bp, Nicotiana tabacum
gttatttgggcattagcagaaatgataaagaatccaagtgtaatggcgaaagcacaagcagaagtgagagaagcttttaaaggaaagaaaacatgtgatgaggatactgatcttgaaaagcttagttacctaaatttagtgatcaaagagacactccgattacaccctccaactcctctacttgtcccgcgagaatgcagggaggaaacagagattgaaggattcactataccgttgaaaagcaaagtcttggttaacgtatgggcaattggaagagatcccgagaattggggaaatcctgaatgttttataccagagagattcgaaaatagttctattgagtttactggaaatcattttcaacttctt

SEQ ID NO: 534 - protein, 123 aa, Nicotiana tabacum
VIWALAEMIKNPSVMAKAQAEVREAFKGKKTCDEDTDLEKLSYLNLVIKETLRLHPPTPLLVPRECREETEIEGFTIPLKSKVLVNVWAIGRDPENWGNPECFIPERFENSSIEFTGNHFQLL

SEQ ID NO: 535 - DNA, 462 bp, Nicotiana tabacum
gaatatcttggtgaaggttactctcgtgatactgtcattaaagcaacggtgtttagtttggtcttggatgcagcagacacagttgctcttcacataaattggggaatggcattattgataaacaatcaaaaggccttgacgaaagcacaagaagagatagacacaaaagttggtaaggacagatgggtagaagagagtgatattaaggatttggtatacctccaagctattgttaaagaagtgttacgattatatccaccaggacctttgttagtaccacacgaaaatgtagaagattgtgttgttagtggatatcacattcctaaagggacaagattattcgcaaacgtcatgaaactgcaacgtgatcctaaactctggtctgatcctgatactttcgatccagagagattcattgctactgatattgactttcgtggtcagtactataagtatatcccc

SEQ ID NO: 536 - protein, 93 aa, Nicotiana tabacum
RWVEESDIKDLVYLQAIVKEVLRLYPPGPLLVPHENVEDCVVSGYHIPKGTRLFANVMKLQRDPKLWSDPDTFDPERFIATDIDFRGQYYKYI

SEQ ID NO: 537 - DNA, 417 bp, Nicotiana tabacum
cttatggtggatttattcattgctggaagtgacacatctgctataacaacagaatgggcaatggcagaacttcttcgaaaacctcaagtacttaacaaagtaagagaagaaatacttcaacaaataggcacagaaagaccagtgaaagaatcagacattgagaaacttccataccttcaagcagttgtaaaagaagcaatgagacttcatccggcagtttcattactcttgccacacaaagcccaaaatgatatacaagtgttgggctacactgtgcctaagaacactcaagttctcgtgaatgcttgggcaattggaagagatccaaaatcctgggataagccactggagtttatgcctgaaagattcataaagtctagtgtggattacaaaggtagggactttgagtttataccc

SEQ ID NO: 538 - protein, 139 aa, Nicotiana tabacum
LMVDLFIAGSDTSAITTEWAMAELLRKPQVLNKVREEILQQIGTERPVKESDIEKLPYLQAVVKEAMRLHPAVSLLLPHKAQNDIQVLGYTVPKNTQVLVNAWAIGRDPKSWDKPLEFMPERFIKSSVDYKGRDFEFIP

SEQ ID NO: 539 - DNA, 501 bp, Nicotiana tabacum
cacatgaaaatgtaaaggattgtgttgttagtggatatcacattcctaaagggactagattattcgcaaacgtcatgaaactgcagcgcgatcctaaactcttgtcaaatcctgataagttcgatccagagagattcatcgctggtgatattgacttccgtggtcaccactatgagtttatcccatttggttctggaagacgatcttgtccggggatgacttatgcattgcaagtggaacacctaacaatggcacatttaatccagggtttcaattacaaaactccaaatgacgaggccttggatatgaaggaaggtgcaggcataacaatacgtaaggtaaatccagtggaattgataataacgcctcgcttggtacctgagctttactaaaacctaagatctttcatcttggttgatcattggttaatactcctagatgggtattcatttaccttttttcaattaattgcatgtccagcttttttaatttggtatattt

SEQ ID NO: 540 - protein, 129 aa, Nicotiana tabacum
HENVKDCVVSGYHIPKGTRLFANVMKLQRDPKLLSNPDKFDPERFIAGDIDFRGHHYEFIPFGSGRRSCPGMTYALQVEHLTMAHLIQGFNYKTPNDEALDMKEGAGITIRKVNPVELIITPRLVPELY

SEQ ID NO: 541 - DNA, 304 bp, Nicotiana tabacum
tataagtatatcccgtttggttctggaagacgatcttgtccagggatgacttatgcattgcaagtggaacacttaacaatggcacatttgatccaaggtttcaattacagaactccaaatgacgagcccttgggtatgaaggaaggtgcaggcataactatacgtaaggtaaatcctgtggaactgataatagcgcctcgcctggcacctgagctttattaaaacctaagatctttcatcttggttgatcattgtataatactcctaaatggatattcatttaccttttatcaattaattgtca

SEQ ID NO: 542 - protein, 73 aa, Nicotiana tabacum
YKYIPFGSGRRSCPGMTYALQVEHLTMAHLIQGFNYRTPNDEPLGMKEGAGITIRKVNPVELIIAPRLAPELY

SEQ ID NO: 543 - DNA, 403 bp, Nicotiana tabacum
ttttaaagatatagattctgtttttcagaattggttagaggaacgtattaataaaagagaaaaaatggaggttaatgcagaagggaatgaacaagatttcattgatgtggtgctttcaaaaatgagtaatgaatatcttggtgaaggttactctcgtgatactgttattaaagcaacggtgtttagtttggtcttggatgcagcagacacagttgctcttcacataaattggggaatggcattattgataaacaatcaaaatgccttgatgaaagcacaagaagagatagacacaaaagttggtaaggatagatgggtagaagagagtgatattaaggatttagtatacctccaagctattgttaaaaaggtgttacgattatatccaccaggacctttgtta

SEQ ID NO: 544 - protein, 134 aa, Nicotiana tabacum
FKDIDSVFQNWLEERINKREKMEVNAEGNEQDFIDVVLSKMSNEYLGEGYSRDTVIKATVFSLVLDAADTVALHINWGMALLINNQNALMKAQEEIDTKVGKDRWVEESDIKDLVYLQAIVKKVLRLYPPGPLL

SEQ ID NO: 545 - DNA, 304 bp, Nicotiana tabacum
tataagtatatcccgtttggttctggaagacgatcttgtccagggatgacttatgcattgcaagtggaacacttaacaatggcacatttgatccaaggtttcgattacagaactccaaatgacgagcccttggatatgaaggaaggtgcaggcataactatacgtaaggtaaatcctgtggaactgataatagcgcctcgcctggcacctgagctttattaaaacctaagatctttcatcttggttgatcattgtataatactcctaaatggatattcatttaccttttatcaattaattgtca

SEQ ID NO: 546 - protein, 73 aa, Nicotiana tabacum
YKYIPFGSGRRSCPGMTYALQVEHLTMAHLIQGFDYRTPNDEPLDMKEGAGITIRKVNPVELIIAPRLAPELY

SEQ ID NO: 547 - DNA, 344 bp, Nicotiana tabacum
gagattcattgctactgatattgactttcgtggtcagtactataagtatatcccgtttggttctggaaggcgatcttgtccagggatgacttatgcattgcaagtggaacacttaacaatggcacatttgatccaaggtttcaattacagaactccaaatgacgagcccttggatatgaaggaaggtgcaggcataactatacgtaatgtaaatcctgtggaactgataatagcgcctcgcctggcacctgagctttattaaaacctaagatctttcatcttggttgatcattgtataatactcctaaatggatattcatttaccttttatcaattaattgtca

SEQ ID NO: 548 - protein, 86 aa, Nicotiana tabacum
RFIATDIDFRGQYYKYIPFGSGRRSCPGMTYALQVEHLTMAHLIQGFNYRTPNDEPLDMKEGAGITIRNVNPVELIIAPRLAPELY

SEQ ID NO: 549 - DNA, 417 bp, Nicotiana tabacum
  misc_feature (273)..(273): n = a, t, c, or g
  misc_feature (275)..(275): n = a, t, c, or g
  misc_feature (294)..(294): n = a, t, c, or g
  misc_feature (300)..(300): n = a, t, c, or g
  misc_feature (374)..(374): n = a, t, c, or g
  misc_feature (386)..(386): n = a, t, c, or g
cagtgaggaagatgatgaggatgtagttgaacaacgttggaatggatatatgggaggccgttgtaagaagttcaaagctaacgattttgttacagagaaggcgaagaataaaaaagacgaggataggctcttctgggaaacttgtttagcttcttagcttaaatctcataagggaagccctgccgtagctggtaaagttgttgtcatatgaccagaaggtcacgggttcgagccgtgtaaataggctcttgcagaaatatagggtaaggctgngnacaatagacctttatgatntggctnttcctcggaccccgtacatagtgggagcttagtgcaccgggctgccccttcttgtggtaattagttggtaaatntctcacgttttnttaagaaccgtcagacattttccattgccaa

SEQ ID NO: 550 - DNA, 343 bp, Nicotiana tabacum
atattgagcgactggaaattactggtgttggtgatccatccggtcggggattagggttcagttacgtccgcaccactcctaaggcaccaatatcaaatgcaatctccaagaaaaaagcagttgttgctaaagggtcaacagtaacaggcactgatgcagatctaagaagactgagcatggaagctgcacgcgaggttcttctcaagtttaatgttccagaggagcagattgctaaactaacaaggtggcaccgaattgctatgattcgcaagctctccagcgagcaagctgcatcaggtgtcaaagttgatctgcaacgataagcaaatatgcacgtgggcag

SEQ ID NO: 551 - DNA, 384 bp, Nicotiana tabacum
gatggagaagaaccaattgaatagtcgaaaaatgaatgtcggaatgtcgccgccggcgagcgaggtggacgtgaagccagagattctgccgttgccgatctcgacaaggccgtcgcaggtttacagtgactttatatacttcgattcatcagattctctgccgaagcttcacactgattccagctgctcggagcaggtgctgtcgtcggagttcacgtgtgagagagaagttcagagcgagccgaaattgagcgattgggagaaaactgccctggaccttcaatttaattacatggatgccatcccggacgtcggagataacggcttgctaggttctcagttccagggctgttatgaaatgtcgccgcttcaggatatattcat

SEQ ID NO: 552 - DNA, 564 bp, Nicotiana tabacum
  misc_feature (389)..(389): n = a, t, c, or g
gacatgtcctatgaggaattattagctcttgaggagaggattgtctctgttagtacagctctgcccgaggaagcactatcaaagtgcctccggaaaagcatttatcagggtatggattcaaaaacagaaacatatgaagctgatggggatggagatgacatcaagtgcagtatttgtcaggaggagtatgtgattggagatgaaatagggaagtttggatgtgagcacgggtatcatttggagtgcataacacagtggtttaggctcaagaactggtgcccgatctgtaaggctacagcagctccgtcagagtcgtcgaaaaagccatcttagtttcagaattttagatatccaacctagatttgggaagctgaaaaacttccccgtgnacaaattcatctggggttggtttgtggattcctgcaattcatttttcctgttctctttttctctattcttgaacttttttcttaattgctcttgccatatgaaccaataaacccaggccattttctggctttgtggtgaatgctttcatattcatttctttaaagcttttctgaa

SEQ ID NO: 553 - DNA, 490 bp, Nicotiana tabacum
ctactacggtcgaggacccatccaactatcatggaacttcaactatggacctgccggaaaatccataggattcgatggcttaaatgaccctgacattgtggctagagatgctgttatttccttcaagactgccctgtggtattggatgaacaattgccattctctcattacttctggccaaggttttggcccaaccattcgagccattaatggccagattgaatgtgacggaggcaaccctcagactgttgccagaagggttgagtattatactgagtattgtcaacaactgggtgtggagactggggataatctcacatgttaggacgtaagtaattaaagaagttgaattaaagaataaccaaagatattaattattagttgctccacggtagtgaggctgcatatatatgttctgagaattgaataagactccactatacatgatttattttaaaaagaatatacgattatattacaccaaaaaaaa

SEQ ID NO: 554 - DNA, 362 bp, Nicotiana tabacum
caaaaaggatcccggccatagcagcggagagcacaaggaagggattgttgagaagataaaggaaaagatccatggagaagaaggcggagagcaccatcccaaggaaggagaggagaagaagaagaaaaaggacaaaaaggacaaaaaggagaagaagcacgatgggcatgacagcagcagcagcgacagcgatagcgattagatctaatcctcgatccctaaataatgatccttccttattagcctttctccaatgtatttcctactgctttctgatatagatctatcttccttaccacttagcagttgcttgtatgttttattggaatgtaattaacgtttgaatcgcttgctgtagaaaa

SEQ ID NO: 555 - DNA, 286 bp, Nicotiana tabacum
  misc_feature (186)..(186): n = a, t, c, or g
  misc_feature (217)..(217): n = a, t, c, or g
gctttgactacagaaccatgcctgtctgttggagcgaattggatgatcgggccgagggctgccccctcttcccctcactctcctttccctaatatgaaccttgagtcatcaaagcctttccgactcggcctggcccggtcgccctacgcgactggcgcttcaaaaggcgaaactctcggtcgtagnttggcgacctatcttcagtaggggcctttantcttttgattagagcaggggtcgcgagagagcagagcgtacctgcccgggcggccgctcgaaatcacta

SEQ ID NO: 556 - DNA, 571 bp, Nicotiana tabacum
  misc_feature (544)..(544): n = a, t, c, or g
  misc_feature (566)..(566): n = a, t, c, or g
tcttgaggtcatagatgctggaaaaaagaaactctacgaggctaaggtctgggtcaaaccatggttgaatttcaaggaacttcaagagttcactcatgttgaagatgttcctaccttgacttcttcagatctaggtgttaagcaagaagatgaaggctctggattgaaatcagtgcctgtgcatgatccggtggttcaggaagctgcagagcatgcaattaagaccatccagcagagatccaactcactacttccatatgaactccaagagattgttcatgcaaatgctgaggtcattgaggaggacaatatgaagcttcatatgctcatcaaaactagcaggggagggaagcaagaaaagttcaaagttcaagtgcaccacaataaagaaggtgccttccaactgaatcatatggagcctgaccactcctaaactgttgaactagctctggacgtcgtttacctctttaaagttttaagaaatgttcccactatggaactatgggagatacataatctatcttttgaagtaaataagcatgtnaccagcaccaatttatatattnctgct

SEQ ID NO: 557 - DNA, 388 bp, Nicotiana tabacum
tgccatgaagtcactaggcagaggtagcatggatgacatcaagtatgtcggtcgtgctccttctgccgccacagccactgggttctaccaagttcatgtgaaagagcagtctgagcttgtgcagaaagccttgcagcgtgatcccgttaacaatccgttctgaagctgaagcgttcacgtatccatatagcactagcctccaaaactgatgcgacaatagaatgtttacttttctctgtgcctggtaatgagagtttcagttgtttggaaataaggccgttttgtttgtgcttcttttcagctggttaaacaattttactgatgctttcacatgtatacgttttcagttagtaacaattttgatcagtaaactcacggctccatcgca

SEQ ID NO: 558 - DNA, 424 bp, Nicotiana tabacum
tatattatgcccttccgcatcctatgaactataatataacagccttcgctcagcaacttacttttgttttcagatgagtatgtcatctgcaatggatgtaaaagtccagatactatcctttctaaggagaaccgtctattcttcctcagatgcgagaagtgtggttctggaagatcagttgctcctatcaaggctgggttcgttgctcgtgttggcaggcggaaagctgggacttaagacggcttggggatttttagttggacaatttcatcttataatcaactttgttaaaagttttgtatgttatgctttgtgtttaaccgagatattgacatgtggtgcaactttgcttatgaagagagttgatatagattcagttttgtgtgatgttgtcttttgcaattcgtcacgctacacgtttcga

SEQ ID NO: 559 - DNA, 554 bp, Nicotiana tabacum
aagaatacgacatcgtagtaaagaaacaagatataagtttcaatggagtttattacgtcaaagaggcgatgaaagaaatcgttaggagttactacattgaagcacaatggttcatcaaagggaaaagtccaccatttgaagaatacctaagtaatgcactcatcactggaacttattacctacttgctccagcttcattattgggcatgaaatcagcttcaaaggcatcattcgattggatgatgaataaacctaaaattcttgtggcttctgcattaattggtcgagtcattgatgacgttgcaacttacaagattgagaaagaaaaaggacaacttgtgacgggaatagaatgctatatgaaagagcacaatttaacagtggaagaagcaagtgcacaacttactgaaattgctgaaaatgcgtggaaggatttgaacaaagaatgcattaagccaacttcaatgccagttgaaatcttgaagccaatcgtaaatctaacacgtctaattgatgtggtttaccaagaataatggaagatggatatagtaatc

SEQ ID NO: 560 - DNA, 439 bp, Nicotiana tabacum
tgctgggggcctagctgttctcagagtaattgaaaaagagaagcttcagcaaaatgcattcagtgtcggatcatatcttaaaaaccggcttacttctctaatggagaaacatgaaataattggtgatgtgaggggaagaggtctgatgcttggcgttgagctggttactgatagacagtcaaaaactccagctaaggtggaaatattgcgagtaatggagcagatgaaagaaatgggagtcctcattggaaaaggaggattttatggcaatgtttttagggttactcctcctctctgcttcaccaaggaagatgcagattttctcgttgatgtgatggattactcaatgtcaaagatgtgagtcaagaagctggttatgcaattaccggtgtttgatcgaaacttgctagaatatttaatatgaagtggcgttaggtgt

SEQ ID NO: 561 - DNA, 272 bp, Nicotiana tabacum
aggttacggtgtaattccaacatcattaacggtggaattgaatgtggcataggacggaatgacgcagtggaagatctaattggatactacaggaggtattgtggtatgttaaatgttgctccgggggaaaacttggactgttacaaccaaaggaacttcggccagggctaggcttcgttacatagaatgcagatcatgttatgtatacaagttatatttgtattaattaatgaataaggggattgtgtatccattaaaaaaaaaaaaaaaaa

SEQ ID NO: 562 - DNA, 430 bp, Nicotiana tabacum
gtattgggttccttgacttcggaattgttggtcgtatatctccaaagacatgggctgcaatggaagtatttctgcaatctataacaattgaagattatgagtcgatggcatctgctctaattgacatgggtgctaccgggaaggatgtggattcaaaggcttttgcgagtgacttggagaaaatatttttgtcaattcaggatttggatacagaaatcattgttgctgctgcaagggacacaaatacaaatgcaaccgctgttgctgccaatgtagtatttgatgagaggcagatgaatgctctattcgtggatgtggttagagttagtgaatcttacggattgaaatttcctcgtgagtttgcacttttgttgaagcaacttctctattttgatcgatacaccagattgttagctccaaatatgaacat

SEQ ID NO: 563 - DNA, 413 bp, Nicotiana tabacum
cataggaatgatgatgatgaaccagtaaggtctgatcaggttcagattacctcgttgattggttcaggatgcagcagcgttgcaggcagtcatgaactaagaaaaatccttgtggatccttagctctctctttgaaactgaactcttaaacaggcatgtatatgtatagtcaggtgatagttatatctattgttacgccattatatcctggtcctttattatcttggactgcgcctagtaagacctccgtttgtaatagtttgatctattctggcttgttttgaagtagattagtactataaattttgagaagccagaggctttgatgtctttataatctctgttgctggtttaggttgcactttgtgtggctcacatgtttatagaaatgtagcatttctggcctaaaaaaa

SEQ ID NO: 564 - DNA, 451 bp, Nicotiana tabacum
tagcaaccttgctcggctatgtagctacttctcgggatccaattattgggggcagcttgctattgacatacacaactggctatgttactcccttactacttgctgcctcttttgctggagcattgcagagtatactttcattccgcaagttctcagcatggatcaatccagtcagtggtgcgctactattaggtgggggtgtctatacctttctcgacaagctttttccagtgacaatggctatgtaggctaatcagctattcaaatagcaacagctggaatggggatgagctttacctgcttcttcttactgtttgagttgcttatgctcaggcaaagcatcattgagttacatagagcaaagtttcaaatgaatgagcaagcaaaggtacgatgtatatgtgggatctgtaactttaactcctacaacaagttgtagaaggtagaaaat

SEQ ID NO: 565 - DNA, 488 bp, Nicotiana tabacum
tgcctcctgctgttggtgaagtgcaggctttcagaatttcaggtccaaagtttgtaaagctgaaccatggtacatggcatgctgggccattatttacagatgacaaaatggacttttacaatctggagctgaacaatactaatgtggttgatcacacaacacatgacttcatcaagaagaatggggtggttttcctactggatgattaggaaaatcacaccaagcaaagcatttcgagtttcgaatgaatgataggctggggggatagtcatgcagttcatgctgtttagagcacttctaatatataccttacatatgtaccataagtaagggctgactagcattgctttctggcttttgcttgtgctgtgaacaactgtaaatagtagcatttatttatcttacactcggctacaagcctacaacactatgccctggtattggtctgtatttgtaaatgcagctcaagtaaaactctttgattttaa

SEQ ID NO: 566 - DNA, 357 bp, Nicotiana tabacum
aggaacctaatgaggaatgataaatccctgaaagactctgttaatcaacaaccaaaataccgacctcctgtaaggaatgtcccaatggttggttctggagtgacaactcgtgccatttcggatgcagctgagaagctggcgaacgtgagcattggctctggtagaggacctacaaagcagccagtatttaagccaatgaaggcaggagggtggcatgggcatcaggacttgttccatggacggtctcaagagtttcttcctggaagaagctattcaaggaaagttgctggatgaagaatgttataagcttgagtgtcgtattctgttcaagtgttatttagtgatagtagtctttat

SEQ ID NO: 567 - DNA, 325 bp, Nicotiana tabacum
caaggagatggtaagtgagggaggcgtagcagagggggaagttgttgtttggctggtgatgaaagaagatctacggctgccggaaagcaaaaacacggcggcgttcacgtgccgggttagggttatcaaaagcgggaaggagaaaaactcaccgattctgccgtgtgatgtgtggagaatggacggcggaggatatgcatggaggttggatacaaaggcagctctctctttgggccggtaggtaaaagtaatatcaactcaacctaaagggtaaaagagtaaatctatgcgccatccaacaatacagttgccaacttgcgcttga

SEQ ID NO: 568 - DNA, 593 bp, Nicotiana tabacum
  misc_feature (545)..(545): n = a, t, c, or g
  misc_feature (560)..(560): n = a, t, c, or g
caaacaagttcttccagctttggctcaagttgcagaacgccagggaaaatatctggcaggtctgttgaaccggttgggtaaagaaggtggagggcatgctaattctgcaaaggacatgaacctcggagatccatttatgtataaacacttagggagcatggctactgttggcagatataaggcccttgtggaccttagagagagcaaggcgggaaaaggtctctctttggctggattcacgagttggttaatttggcgttcagcatatctaactcgtgttgtaagctggcggaacagattctatgtagcaatcaactggttgacaacttttatctttggccgtgatataagtcggatatgaacttttaccaaaacttccttcagtttggctcagcatggtaaactatgtggtattgaatgtgttacttctcctccaagttgatttcttgaataagttagctattatcaacttcttaagtaagattgcggtatgacttgcagaaattcgatataggttctgatctagcctattattggtaatagtngaaggatgcctaatnagaagggagttcatgctttggaaaaaaatgctg

SEQ ID NO: 569 - DNA, 517 bp, Nicotiana tabacum
tatggatatggtcaggactatcaaggagcaaaaccgaaagaaacagaagacttttagtgatcgtgctgcagttgaagagaaaggcaagcctagaaaggccgtgttcgagggccgtggtagaaaagcatgagtttgggatggtaaacaggaagtggaaggcagtggttgatggttgtaactaagctctcaatcgggcgtttgcattgcaatgttgctgccctgttgttggagatggttttggattggaagtttctgtggcagttaagttgttttgcctatggttttgaaattttacctttcccatatcaggacgatttatgtcaacttagtcctagtggatttgtagctatgttaatgcactttcttgcttatgcaatctagtttagggaaatatttcctgcgaattaaacgttgctatgcattaggttcagctgttcagtacatatgagagtttctataaaatgtatgctctagaattacctataaaaaaaaaaaaaaaaaaaaaaaaaaaaagctt

SEQ ID NO: 570 - DNA, 375 bp, Nicotiana tabacum
gaaatgcaattagacaagacctagttaacaacccagatttagtagctacagatgctactatatcattcaaaacagctatatggttctggatgacaccacaggataataagccatcaagccacgacgttatcatcggtagttggactccgtccgccgctgatcagtcggcgaatcgagcacctggttacggtgtaattaccaacattattaacggtggaattgaatgtggcgtaggtccgaatgccgcagtggaagatcgaattggatactacaggaggtattgtggtgtgttgaatgttgctcctggggacaacttggactgttacaaccaaaggaacttcgcccaaggctaggattcgttagatcatgttatgt

SEQ ID NO: 571 - DNA, 603 bp, Nicotiana tabacum
ccaattatctatggtgatgtgagccgccccaacccaatgactgtattctggtcaacaacagctcagagcatgaccaagcgcccaatgaagggaatgcttaccggaccagttaccattctcaactggtcttttgtcagaaatgatcagccaagatttgaaacttgctaccagattgctttggccattaaggatgaagtggaagatttggagaaggcaggcatcactgttatccaaattgatgaagcggctttgagagaggggttgcctctaaggaaggctgagcacgccttttacttgaactgggctgtccactccttcagaatcaccaacgtaggcattcaagacaccacccagatccacacacacatgtgctactccaacttcaatgacattatccactctatcattaacatggatgctgatgtgatcacaattgagaactcacgatccgatgagaagcttctctcagtttccagggagggggtgaagtatggtgctggaattggccccggtgtctatgacatccactcccctagaataccatcaacggaggagattgctgacagagttaacaagatgctggctgttcttgacaccaacatc

SEQ ID NO: 572 - DNA, 459 bp, Nicotiana tabacum
cgactttgcaccttgtgcttcgtcttcgtggtgggatgcagatttttgtgaagacgttaaccgggaaaaccatcactttgggggtggaaagttctgatactattgacaatgtgaaagctaagattcaggacaaggagggtatcccccggatcagcagaggctgatctttgcgggaaagcaattggaagatggacgaaccctcgctgattacaacattcagaaggagtccaccccgcaccttgtcctccgtctccgtggtggtttctaaagtgtctgtcagtgcctgtgtctgtgtctggggtctgtttggttcatgatttagaatttgtgtagtttctgttagttgtcatcatgttatgtttccaaaagaggcgaggaggcttgttccctcttgtctctgtttgtgaataataaagtttaattattgtttaaaaaaaaaaaaaaaaaaaaaaaaaaaaa

SEQ ID NO: 573 - DNA, 391 bp, Nicotiana tabacum
cacaacttttccaacttcaatatctttattcactaatactctatatttcttgattccttatctccctcttctcactctctctctctctctctctctctctctctctctctctctctctatacataaaagaaaaactccattcattcgcagctagctttgatcagtagagtttgtggctgaagttaaaagaagatgagaagaaactgtaacttggagctcaggcttatgcctccttctttttccttttctcctaagaattgcactaccccctacttctcaatggatagggaggaaaaaagaaagcacagaagagacagcaactgcgccaccgtttgtctgaccgaaggattttctggtggcgactgccgtggattccgccgccgttgtttct

SEQ ID NO: 574 - DNA, 620 bp, Nicotiana tabacum
acttctatgaccagcacagaggtatgagattagatatcgatgacatgtcctatgaggaattattagctcttgaggagaggattgtctctgtcagtacagctctgcccgaggaagcactatcaaagtgcctccggaaaagcatttatcagggtatggattcaaaaacagaaacatatgaagctgatggggatggagatgacatcaagtgcagtatttgtcaggaggagtatgtgattggagatgaaatagggaagtttggatgtgagcacgggtatcatttggagtgcataacacagtggtttaggctcaagaactggtgcccgatctgtaaggctacagcagctccgtcagagtcgtcgaaaaagccatcttagtttcagaattttagatatccaacctagatttgggaagctgaaaaacttccccgtgtacaaattcatctggggttggtttgtggattcccgcaattcatttttcctgttctctttttctctattcttgaacttttttcttaattgctcttgccatatgaaccaataacccaggccattttccggctttgtggtgaatgctttcatattcatttctttaaagcttttctgaaaaaaaaaaaaaaaaaa

SEQ ID NO: 575 - DNA, 484 bp, Nicotiana tabacum
cttattacattgacttagttggacgatacaaattgagctcgcatgcccgcacaaaaactgatggagcaagaacgaaggttgctcaagagatttacaaagaactgcagaatgccaggcaagaagcgctgcagagaaagaaggctgagcagagaaagaagatagaggaagctgaggctaagcttagtgcagaagctcttcgcaagaaagaggctaaagagcgtgcacggcagatgaagaaggcaatgccaaaaatgaaaatgacccgggctgggtagattcgagtttatgtgccatctcaatcttctctagatcccgtcaatggtcattgtgtgtcccagtgtcgctgaatttgattcttgtattaggtagacgggatgtctctttgttggttctgtaatttagttaagtagtctaggggtctttccttattctggccacaggttgtggattttgacttagtttggtgcctattgtgaagtaatgg

SEQ ID NO: 576 - DNA, 325 bp, Nicotiana tabacum
aaacacaggcaactttatcacggaccgaccatctaccaaagtccatgctgctcctggaggtggatcttctttgggatatctcttcggggatggcagcagctaagcaattccccaatctacagttggataattgtcttattgtttctttaccttttgtctttcgactatgttgtaattgtaattgcgagtatttcaggttgttgtgaagtgttaattggataaacttccatctaaagtcccagttgacactttgaaactaaagttactactatctaatgtaatatgtgacttttgttgattgaaaaaaaaaaaaaaaaaaaaaaaa

SEQ ID NO: 577 - DNA, 359 bp, Nicotiana tabacum
ttttgtgaaaaaggggactagagtaagttatcatatctatgcaatggggagagtggggaacttatggggaaaagattgggcagagtttaggccagagaggtggttagataaggatgaagcgtcaggtaattggacttttgtggctagggacacctatacttatcctgtttttcaggcgggaccaagaatttgtttaggaaaagaaatggcatttttgcagatgaagagggtggtggctggtgttttacggcggttcaaggcggttccgctggcagaaaaaggtgttgagccggtctttttgtcttacctcactgcgaaaatgaaaggtggtttccctgtgacaattgaggaaaggaacg

SEQ ID NO: 578 - DNA, 417 bp, Nicotiana tabacum
attgaagagtaatggtggattatttttttggatggatttgagaagattacttaaagagtcaacatttgaagctgaattggatctttggcatataattataaatgaagttaaactcaatgtttcacctggtgtttcatttcattgttctgagcctggttggtttagagtttgttttgctaatatggatgatgaaactatgagagttgcattgagaagaattagacattttgtgctacaaagaaagggattaattgaagttgctaccaagcaacaatgtagaaggagcaaacttgaaattagtttatcatttagaagattggatgatttcatgaactctcctttcatgaattctcctcactctccaatgtcttctcctatggtccaggcgaggacttaatggcgtccagatcagcttgc

SEQ ID NO: 579 - DNA, 271 bp, Nicotiana tabacum
gctctgctctctcgcgacccctactctaatcaaaagactaaaggcccctactgaagataggtcgccaaactacgaccgagagtttcgccttttgaagcgccagtcgcgtagggcgaccgggccaggccgagtcggaaaggctttgatgactcaaggttcatattagggaaaggagagtgaggggaagagggggcagccctcggcccgatcatccaattcgctccaacagacaggcatggttctgtagtcaaagcaacttcgtcactttcgt

SEQ ID NO: 580 - DNA, 511 bp, Nicotiana tabacum
  misc_feature (26)..(26): n = a, t, c, or g
  misc_feature (399)..(399): n = a, t, c, or g
  misc_feature (474)..(474): n = a, t, c, or g
aacccaagctacggagcaagaccgtngaggagagctattatgatactgctggaagacagcatggctgagaagatgcttgcaggtgagatcaaagaaggtgattcagtaattgtggacgtggactctgatggcaatgtgaccgtcctcaatggcactagcggaactccctcagatccagctcctgagcctatccctgtgtagatccgcttcttgctttagctctgcaaattcgttgtttgtaatgttgctttcatttgtcttggccactaagctctcctggggttatgaagcaacttgtgagtaatttatggggtcattgggtgaaatctgccaagttgagaagggtggcatctccattatatgcagagctttacaggattacacactacatactggatntcgtgaagattgtagtgacctcgcaagatagtgtaaaattgcgacgaagactatgtagaaccatatcttctaatntatggtaggtgatagtcgaatttgtcataaaaaaaaa

SEQ ID NO: 581 - DNA, 519 bp, Nicotiana tabacum
ttgattctccctctagaaagaaaaccctcggcggaagaacagtagtagaagcgtgatcatcatgtcggctagcggcggcggtagtggtggcgcaggagaggaagggaagaagcctaacgatcaggcggttcatatcaatctgaaggttaagggtcaggatggaaatgaagtgtttttcaggatcaagcgtaacacacagttgcgcaagctcatgaatgcttactgtgaccgtcagtcggttgacatgaactcaattgcattcttatttgatggtcgcaggcttaagggagagcaaactcctgatgagctggagatggaggagggtgatgaaatcgatgcaatgctacatcaaactggaggcaatgatgcatgatgctgctgcgcttttgttcctaattgttaacttggtggttatatggttgtagttggttgttagggtgaacgctttggagtgttggttattactctcccatctgcctaaatgggggagtgtatggatgttagtagttttagttttca

SEQ ID NO: 582 - DNA, 216 bp, Nicotiana tabacum
ccaattatctatggtgatgtgagccgccccaacccaatgactgtattctggtcaacaacagctcagagcatgaccaagcgcccaatgaagggaatgcttaccggaccagttaccattctcaactggtcttttgtcagaaatgatcagccaagatttgaaacttgctaccagattgctttggccattaaggatgaagtggaagatttggagaaggca

SEQ ID NO: 583 - DNA, 142 bp, Nicotiana tabacum
gagcacctaaataatccgtgtgtgtgtgtgagtcttccctttgatgtaagggttttacttctatatcttggtggggtttaattatgtcatgcacatgttgttcactgtgcaagtgtgaataatactataccttttaatgaaa

SEQ ID NO: 584 - DNA, 265 bp, Nicotiana tabacum
tgtttggactgtatgaatggcgctctctgctctctttgtttatctcatcacaaggaacatcgtgccattcagataaggaggtcatcttaccatgatgtgataagggtgaatgaaatacagaagtatttggacatcacttcagttcagacctacattatcaacagtgcaaaggttgtgctcttgaatgagaggccacaacctaggccaggcaaaggtgtcactaatacctgtcaggtttgtgaaaggagtctcctcgactccttca

SEQ ID NO: 585 - DNA, 272 bp, Nicotiana tabacum
atgaagctcaatacggtggtggaggataccctgccggataccctgccgccagataccccgttcctggtggcggatatcctgatggaggccgtggtggtggtgtctatcctggcagtggacgtggatgcggaggatactgccgctatggttgctgcggccgccggaattacaggtgctgctcctacaaaggtgaggccatccatggataaggtcactatattgaggctaagcctcacaacgtatcatcatgtggagcaatatataaaaccttt

SEQ ID NO: 586 - DNA, 251 bp, Nicotiana tabacum
acagcttacattcggactgggccattcatggaggatgcaactgactcaaaaataagcttgactctctacgatgcgagtggctatggaattagaatcaagaacctagtggcttggggtgggcttatgggctcaggttacaactactttgaaacggaccactcagatatgttcagtggccatggaccatgtttgactgggccgatctgcaaaatggtcttgacttctgatggtacaggccgacaatccgcgtg

SEQ ID NO: 587 - DNA, 592 bp, Nicotiana tabacum
attcttacttacatggctcgtggttcccctcattcagggttttgaagatgctggagattttacacttgtagagcgattgaagactagcatacatgccaacttggtcttctatgccatcctgggggtcgtcggtcttcttggacttattctcctcattaccatgcgaaaacgttgggatggtaatgcactgggttttgctatggcatgctcaaatacttttggacttgtgactggtgctttccttcttggttttggtatgagcgaaattccaaagagcatgtggaaaaatgcggattggactactcgtcagaaggtgctttctcataaaattaccaaaatggctgtgaagcttgatgatgcccatcaagaattatcaaatgctattgtggttgctcaggcaacatcgaagcagatgtccaagcgtgatcctttgaggccttatatggacgttattgataagatgttagttcaaatgttcagggaggatccatctttcaaaccgcaagggggtcgattgggagaagatgacatggattatgatacagatgagaaatcaatggcaaaacttaggcgtaatcttcgtatagctcga

SEQ ID NO: 588 - DNA, 540 bp, Nicotiana tabacum
accctgaaagctggaggtcttcaactggagaaagactatccttacactggcaaggatggcaaatgtcactttgacaagagcaaaattgctgcagctgtgactaacttcagtgctattggtcttgatgaagaccaaattgctgccaacctggttaaacatggtcctcttgcagtggggatcaacgctgcttggatgcagacatatgttggaggagtttcatgcccattaatttgcttcaagcgtcagggtcacggagtgctcttagtaggttatggttctcatggctttgctcctatcagactcaaggaaaaggcttactggatcatcaagaattcatggggagagaactggggagagcatggatattacaagatttgcaggggtcacaatatctgtggagttgatgccatggtctctactgtgactgctgcccatactactaatcctaacctgtgagatgaacttatcccaggaatgttgcctgtgatcaagggttttactacattatcctaatttgtgtaaatatgtcgttcagtaaat

SEQ ID NO: 589 - DNA, 409 bp, Nicotiana tabacum
tggctacactgcttatgcgcaacaaagacgcaaagaggcagaagagaagcgacctagtgacaagaagttagatagaagatcttgacaatctaattagattcactgactctgaaatattacggctgcagcacccaagcatagacatgaaagtaatgcctctaaagagattatggactcgggattatgatcatctttgctgtgtgtagacgagctttagagctttttatatttgtcttgccaacacaatcccgtcctgcaaaagtttgccagatgacaaaaaagttatcttccttcgagcagtggtgcctcatttagagaggcaatttactggcatctattgtaaattgcatacattgatacccagttcttttactttgtgaaattaatcatggattttgaagtcaggaat

SEQ ID NO: 590 - DNA, 528 bp, Nicotiana tabacum
aactgcaccaataccattcctgggcaattgttggaaaatgtctctgttattgtggatccgtccgaagctgaggaattttctgaaatagcatccaaacctctcaagtctcttccatatgatactccagggcagacatttgtggcttttgagagacctgaaggagtccctgctgttgggaaattctcgaacacactaagtttcattgttaaagaggttgatccaaccactggtgaggctgaagatgatggtgttgaagatgaataccaactagaagacctggaggttgtcgctgcagattacatgctgaaattgggagtctccaattttaggaatgcatgggagagcttgggaccagattgtgaacgcgtagatgaatatggtcttggcccaagggaaagcctgactgaagcagtaaatgcagtcatcaaccttcttggcatgcaaccttgcgagggcactgaggtagtcccaagcaactcaagatcgcacacatgtttattatctggtgtatacattggcagcgtaaag

SEQ ID NO: 591 - DNA, 416 bp, Nicotiana tabacum
aaaaattcttggcagcctcgccagctagcattttgaagcctgaggcatcaggtcttaagcgggttggaaatcttttaaacaagatgaggaccaagaagagaacgattgatagttgtgccatgctaaggaaattgtgggatgataatcctcgagaattgttttcagaaattttggattggtttcagcagggatttcatgaccattttgaagacctttgggcaaagatgcaacttgaagtatttttagacccaaaaaaacggctttccaagaaggtcaagatgagagaaaaggaacccatgaactttctatgattagggatattatatgcctttcagaatctaagctggatggagagatgcagaggtgggttgaggttactgatttggaagatgggatactgtttgtgggggataatt

SEQ ID NO: 592 - DNA, 403 bp, Nicotiana tabacum
caaaaaatatgcaatggacaattcaagtgtcctaaatggatgtcatctgatctaaaacgatttttatctcgacttcttgatacaaatcctataacaagaataacaatcgaagaaatcatcaaagatccttggttcaagaagggcttgaaacgcgttaaattttgcgaggtagatggtcagcctcagaaacatattcagaatttaaatttaacgagtccatccagctctgatgagcctagcaaggaaatagaagaggttaaggagggagaagacaagagttcttatttgaatgcttttgatattatctcattctctttaggattaaacctctcaggattgttaaacgatgaatgcaatccgttggaggattcagagcggttaatcgtggaagagtcggatgaga

SEQ ID NO: 593 - DNA, 353 bp, Nicotiana tabacum
cttccagaaacttccacgcgctaaaccctcaccctactgccatccacactctcatcaggcccatttccgtcactctacagtctacaaccgtcgctaacggcagacgtagatcgagtatcgccggcgtttcaaccatggccaacggcggagataacggcgttacgtttcagttaactccgtcgagcttgttaaagattcagaaaggtgatatcactcaatggtctgtagacggattctctgacgctattgtcaatcctgctaatgagcgaatgctgggtggtggtggtgccgatggagccatacaccgagctgccggtccagaattacgagatgcatgctacaaagtcccagag

SEQ ID NO: 594 - DNA, 311 bp, Nicotiana tabacum
aagccaaaaccagttctcccgcggaatgtaaccccaactagaccactgcagtctgctcctaaacctacttctgctcctcccccaagtagacctcctccaagggaatcagccatagatcttgaaaagctaaattcagcaagaaggcggcttcaggagaattaccaagaagctcaaaatgctaaaaagcaaaggacaatacaggtgatggatattcatgagattccaaaaccaaagaacggcttctttgccaagaataaaggcggctttcagggcaggcatcatcgctgattttgtcagaagcccgtttgtgt

SEQ ID NO: 595 - DNA, 348 bp, Nicotiana tabacum
gcgaactcacgtgccaatatcacaatcctctgttgctgatttaccaattgcgagacgaaattcacttacaagatttttggagaaaagaaaagatagaattacttcaactgcaccatatcagatttacaacaaaaaaatagcagattctaagactgaggaaaataaggcatggcttggattaggtgcaaaatttgttccagtgaaaactgagcagttcttttagttattttggtaatactactggtagacggggagccttggcgtagctggtaaagttattgctatgtgatcacgaagtcacgggtggtctggccctttctcggactccgcacatagcagaagcttagt

SEQ ID NO: 596 - DNA, 322 bp, Nicotiana tabacum
aagtatattcacatagaagagatgcttgggaatgtagctggcgcgaggcagatttttgagaggtggatgacatggatgccggaccagcaagggtggttaagttacattaagtttgagttgaggtataatgaggtggatagggcgagggcgattttcgagagattcgtgcagtgtcatccgaaagttagtgcatggattaggttcgcgaaatttgagtttaagaatggggaggtagcgagggcgaggaattgttacgagagggctgtggataagttggcggacgatgaggaagcagagcagttgtttgtggcgttcgcggagt

SEQ ID NO: 597 - DNA, 651 bp, Nicotiana tabacum
  misc_feature (581)..(581): n = a, t, c, or g
  misc_feature (622)..(623): n = a, t, c, or g
  misc_feature (634)..(634): n = a, t, c, or g
tggagagggaagcagcaggggtgctaggtctaacagacgtatcgatcggtccgaactggaaggatattcggaccggtgggttttcactattgcgccaccattcatttctagaggcgcatcaatgaaatcaccaaaagttggagctgaaactggtgagggttccacctctggaagtgtgaaaaacgccgtcaaattaccgtcgtttaaatgcttggaaccaaaaggtgatgaaacctctttgatgtctgctgactcggctcgacctccggtttagtaaatctttaatccggttcgaggtaaccgcttttggagacgcgtctggcgacttttcgtgtgctatgaaagaggaccgtctttctcatgatgggttgggccccaccttgcaaggtataaatgtataatagtccaaagttaactttcaattttacaggtttagtagaaaaacatttttgttacttcgagcggccgcccgggcaggtactcttaagtcttaagtaaggtctcactgcttttctctatcctttgttcatttgctccaccttcttaaagcaacgcacagttggatgatgaattcaattgtntaatcaaatgcctcctattactgctgtcaactacaatagtnngatttacattnacgcctgctttgaactg

SEQ ID NO: 598 - DNA, 634 bp, Nicotiana tabacum
atcagagaaactatttacgaaactccatttcttcttcttctttagtgtgtattgtatggccgccaatttgcagagccgtggactcgtgagcttagggaaacgagttgtgaaccagatcagctacgctagtggtcgaacttctgctaactcaccttcactctctggcaggaggggagtgcagacatcggtttacgacaagaacccggaggatcatgtgcgggattcagtggtgccggatgaagtgatagagccacaatcagaaaaatactggggtcctcacccacaagctggggtgtttgggcctgcagccactgatagtgctggtggggaacgtggtttccactcctcacctgccactgctgctgctgctgaaaccattttggagcagaaggccttcttccgccctctagaggacttggacaaaccccagcacgcctaagtttcacattcccttaatagctccagtgcgtctatcctcactggcaaacttaagtctatatatagtgtgtagtggtggcttttaataagtttctgttttgcttgtgtttatgcgagtctgtattatatcaagtttaaagtgcagtatagactattagggtaaagctgcaccgcttttgaaggttccgttcatatg

SEQ ID NO: 599 - DNA, 536 bp, Nicotiana tabacum
cacctgcgttatcttttaacagatgtgccgccccagccaaactccccacctgacaatgtcttccgcccggatcggcctgcaagcaagccttgggtccaaaaagaggggcagtgccccgcttccgattcacggaataagtaaaataacgttaaaagtagtggtatttcactttcgcctttcggctcccacttatactacacctctcaagtcatttcacaaagtcggactagagtcaagctcaacagggtcttctttccccgctgattctgccaagcccgttcccttggctgtggtttcgctggatagtagacagggacagtgggaatctcgttaatccattcatgcgcgtcactaattagatgacgaggcatttggctaccttaagagagtcatagttactcccgccgtttacccgcgcttggttgaatttcttcactttgacattcagagcactgggcagaaatcacattgcgtaaacatccgcagggaccatcgcaatgctttgttttaattaaacagtcggattccccttgtcc

SEQ ID NO: 600 - DNA, 313 bp, Nicotiana tabacum
aacagaaatgaaaagggtaacccctaatggcagcccattgaatgataccaagtgttggcagctaacaaatagcatcaggaattactgagacaacagacagcccagaaaacttcccctaacggatcttcacaatacattttcaggtttctttaccctaactataaggaaaagagaccctacatgacttcaccaaaaacaagaagttggctgcatttgtctcctgacttctattataggttcttttgctttgtcaaatttatttattcctacttttgaacattcttaaatggaagctacttgttggagcacctgt

SEQ ID NO: 601 - DNA, 383 bp, Nicotiana tabacum
tttctccttctcttgtgcgtttttgttaagcaagttcttcagagggagaaacagagaaaaattctctacgataatgttggttatcaggatcttctctccggtgatgagctcctttcggattcattttcctacactgaacttgagaatggagtgctttgggaagtgcaagggaagtgggttgttcagggagctgttgatgtgaacatcggggcgaatccatctgctgaaggtgcagatgaagacgaaggtgttgacgatcaagccatcaaggttgtcgatattgttgacactttcaggcttcaggagcaaccttcttttgacaagaagcagtttgttgcctacatgaagaaatatatcaagaacctaacacccaagttaggcgc

SEQ ID NO: 602 - DNA, 383 bp, Nicotiana tabacum
agctagaccgtgcaaaacagtcaacaaagtctgcaattctaatgaacctggagtcacgtatggttgcatcagaagatattgggagacaacttttgacttatggagagaggaatccagtggagcatttcttgaaagccattgacacaattacagccaatgatgttgcttctatggcagagaagcttatttcttctcctctgacaatggcatcctatggagatgttccttccctccccacatacgacgcagttagcagcaggttccattccaaataaaacaatttacaacaagcagcccgcagactcatttgacttgtccttatttttgggcatttgagaattttgagtgtcgatgttgcctcaatttgtggaaaataaggaatt

SEQ ID NO: 603 - DNA, 185 bp, Nicotiana tabacum
acgtgggacggaattcatctatttggtatggatgtgtgttaagaggtgatgttaacagcatcagtgttggatctggttccaatatacaggataactcccttgttcatgtggccaaatcaaatataagtcaaaaggtgctacccaccattatagggaacaatgtcactgttggtcatagtgctgtt

SEQ ID NO: 604 - DNA, 570 bp, Nicotiana tabacum
  misc_feature (538)..(538): n = a, t, c, or g
ccctttgatttgttgttgtcaactaggtcagtagaagtatgccagagatggaggatgtcaaagaccgaatagatggagcagaaaagccaatgccatcaaccaaacaggaagaggaagttgttaaaaagaaatacggaggaattatgccaaagaaaccacctcttatctctaaggatcataaacgtgcttattttgattctgcggattgggctcttggaaagcaaggtgtagcgaagcctaaaggtccactcgaggcacttcggccaaagttgcagccgacgaatcaacaaactcgataccgcaagtcgccttatgctccatctgagggtgaagatggaagcaatgcgccaccagaggatgcaactgcaaatgaatgaaagcggataatggccttcgagcttgtgatattgttcattgttattacatgtatgagcaatttctcttcagtattaagaaagcaaaatcaaagagtttgaggtgttttcatgtttatttgaggcaaccaaatcagtagctgcggtgttgtaactttggagtnatactttctgtgatcctccatttatgtatgat

SEQ ID NO: 605 - DNA, 302 bp, Nicotiana tabacum
aaagaaaggagaggtggcggtggatcgaaggcggagatgggacatgtagtaggtgataggaagagattaaatgaagcgttggataagcacttagagcggtcctctccctctacctccgctactactgttaggtgtgctaacggcaaggataatcacttttccatttccaaatcaaaggaccagctcaggaactctgctgctcctcctcctgataataagtgctctgatgcagaatctgaaacagacagtgaggcgtcagatattagtggttctgaaggagaagacacttcatggatctcatg

SEQ ID NO: 606 - DNA, 242 bp, Nicotiana tabacum
taggttgaattactattgcgacactgtcatcagtagggttaaactaacctgtctcacgacggtctaaacccagctcacgttccctattggtgggtgaacaatccaacacttggtgaattctgcttcacaatgataggaagaaccgacatcgaaggatcaaaaagcaacgtcgctatgaacgcttggctgccacaagccagttatccctgtggtaacttttctgacacctctagcttcgaatt

SEQ ID NO: 607 - DNA, 287 bp, Nicotiana tabacum
ttcatcagcaatgtcttgacacgtggctcgccacgcacgtgtcttgtccgctctgtaggtctactcagttttttaagaaggcggatgaggtttgtttagatgtgaatgaggtagaaaatgggaacggtgtgagtggctgatcgacggttcaagagtgtgacacgtgtaggaatattaggagatcgtgtaactattcgaacttaggaaatagagtggcattgcacagaagtgcaagtttctgaaaaagaatttgtgaaatttgtaaagatattgtaagtatactttgt

SEQ ID NO: 608 - DNA, 516 bp, Nicotiana tabacum
ttgctgcaaccaatagaccattcgaccttgatgaagcagttattaggaggcttccacgaaggctgatggtaaacctgccagatgctccgaacagggagaaaattttgagagtgatattggccaaggaagagttagcaccaaatgttgatctcaaagctattgctaatatgactgagggttattctgggagtgatttaaagaatttgtgtgtcacagctgctcattgcccaattagagaaattttggagaaagagaaaaaggaaagagcattggcagttgcagagagcaggcctgtccctgcattgcatagtagtgcggacattcgtcctcttaacattgatgattttaaatatgcacatgaacaggtatgtgctagtgtatcatcagaatcggcaaacatgaatgaacttctccagtggaatgaattatatggtgaaggtggatcaaggaagaagaaatctctcagctatttcatgtagagacatttgaactgtatagcattgctttatttatttg

SEQ ID NO: 609 - DNA, 226 bp, Nicotiana tabacum
ggaataaaagttaactgtgtttctcctcattacattagcacaccacttgtattgaatgcgcttggaatagctgagagagagatagcggaaaaatggtttgcagcaggaggaaatttgaaaggagctttactagatgaagaggaggtcgcaaaggcagtgctatacttagcaagtgatgattctaaatatgtgagtggtatgaatctggttattgatggtggtttta

SEQ ID NO: 610 - DNA, 457 bp, Nicotiana tabacum
tggagctgccaaggctgttgggaaagtcctaccagcattgaatggaaagttaaccggaatggctttccgagtcccaactgttgatgtgtccgtggttgacctcacagtgaggctggagaaagaagctacctacgttgaaatcaaggctgccattaaggaggaatctgaaggaaaattgaagggaattctaggttacactgaagatgatgtggtgtccacagacttcgtgggagacaatagatcaagcatatttgatgccaaggctggaattgctttgagcaagaattttgttaagctcgtttcgtggtatggggttacacgcacacgagtggtggacttgattaagcatatggcatcagttcagtaaaagtggcagtttactcattggtggccaagtgtagtggtgctgctgtgaggagtctgttatttgttactagataaagcagtttagaataaa

SEQ ID NO: 611 - DNA, 523 bp, Nicotiana tabacum
agagtcagttagcgcttcactctggaggttcgtcaccttatacatatcttgaactccgacagatggctgcaggatacatgaggaaaaatgctaccaattttctcccgtttttcctctctgagaatatgacagaaggagaatcggacgattctcttgtggaaaggtttgagaattactgtgtagaagtggagacaaccgcagcatggggcggacaacttgaactcggtgctctaactcatatcttaaagaaacatatcatgattttttcagggtccttccctgatgtagagatgggaaaagaattcaaatctgatagcagcactatttcttctaatttaagtataatgctatcataccacaagcatgcatttgggctcggtgagcattataactcggttgtccggagtttatcctgagaggtatgttctatatcatgtggccaagtgtttccagcaactatgtttttgtaagcttatgttgtcctcttggtttacaacaatctgcagttaacataccattttct

SEQ ID NO: 612 - DNA, 453 bp, Nicotiana tabacum
ctaaaagggctagctatatcagagtcattatgttggagttgagtcggatagcttctcatttgttatggctaggcccttttatggcggatattggtgcgcagacccctttcttctatatttttcgagaaagagaattgatatatgacctcttcgaagctgccaccggtatgcgaatgatgcataattattttcgtatcgggggagtggctgccgatctaccctatggctggatagataaatgtttggatttttgcgattattttttaacaggggttgctgagtatcaaaaacttattacccggaatcctatttttttagaacgagttgaaggcgtaggcattattgggggagacgaagcattaaattgggggttatcgggaccaatgctacgagcttccggaatagaatgggatcttcgtaaagttgatcattatgagtcttacgacgaatttg

SEQ ID NO: 613 - DNA, 557 bp, Nicotiana tabacum
agagtgatttcttagcacaaggttttggatcccttgggttgatgacatctgtcctggtgtgtcctgatggaaagaccattgaggctgaagcagcccatggaactgtcacccgccactacagggttcaccagaaaggaggtgaaaccagcacaaacagtattgcatcaatctttgcctggactcgtggacttgcacacagggcaacgttagacaacaatgaaaggctcttggattttactgagaaactagaggcagcatgcattggtgcagttgaatctggaaagatgaccaaagatcttgcactcatcatacatggatccaagctctcaagagatcattatctcaacactgaagagttcatcgatgctgtggccgatgagcttaaagcaagacttctgaaagcaaaggcctaaatgtctgggctgaccagaggagagcctttttgtctggggcaattgagggatattaaagagaaataaaaggattagggcctgatggtatactaaatctcaagaggtttatttataggtgggggttactctccaggcattaatgtt

SEQ ID NO: 614 - DNA, 458 bp, Nicotiana tabacum
aaagacgaatggtggtgatagcagtgataatgaagctacaagcagtgtgaatgacagtggcagcagtatgcagaggttagggatatcttcttctgttgagaagaaggaagggatcaaaaggagtgctgtgggagatatcgctccgaccacaaggcactacaggagtgtttcgatggatagttttatggggaagttaaacttcgttgatgattcaccaaagttgcctccgtctcctggaccgcgcccaggccaactctcaccgaccagttcgcttgatgcaaatccaaacagcttcagtatggaatttggaaatggtgaatttagtggagctgaattgaagaaaattatggcaaatgagaaacttgcagagatagccttagcagatccaaagcgggccaaaaggattttagccaaccgtcaatctgctgctcgttcaaaagagcgaaagatgagataca

SEQ ID NO: 615 - DNA, 407 bp, Nicotiana tabacum
ctaaatctctttcaaatctggttgttcacatcatagacactcatgtggatcaccttcaagatgttgtgacgaagctggagattgagttggattcaatggagctggaattggacaaaggtggttttgctttgaagaaacaattgctggacgatagaaaatttccaaagatgcatcttgacctgcagcgcctcctccaggtgattgcacatggtgagcaagtatttccgcgagtgaaggagaaatgttcttcaaaaggttggtttgccagcgatgacatcacttcacttgaagagttaattggtcgactgagaagactaaaggagaatgttgggtttattgccaatcgtgtaacagcaattcaggcaggtcttgatagctggcagtctgagcagataaataaaaaactt

SEQ ID NO: 616 - DNA, 542 bp, Nicotiana tabacum
tggacgagggtggtcaaggagtcctacattttgcggcagctcttggttatgactgggctataccacctactatagctgcaggtgtaagcgtcaatttccgagatgtgaatggatggactgcactccattgggcagcatcttatggaagagagcggacagtgggtttcctcatcatctccttaggtgcagctcctggagcattgacagatcctactcctaaacatccttcaggaagaacacctgctgacttagcttctagcaatggacataaaggaattgctggttatttagcagagtcatccttaagctcccacctttcttctctcgagttgaaggaaatgaagcagggtgagactgtgcaaccctttggagaggctgttcaaacagtttctgaacggtcagctacaccagcttgggatggtgactggccacatggagtctcattgaaggattctctagctgctgttcgtaatgcaactcaagcagccgctcgtattcaccaagtcttcggggtgcagtcgttccagaggaagcagctaaag

SEQ ID NO: 617 - DNA, 393 bp, Nicotiana tabacum
aaaccctcagagagcttcagccccccatttattattctctttttctttgaaatctgaaagggaaagagaagcagaaaaagaaatgggagagaagccaaaatctggaggtgtttggcccactgttaagcccttcgttaatggaggtgcttctggtatgcttgccacctgtgttattcagcccatcgatatgatcaaggtaaggatacaattgggtcaggggtcagcagttgatgtcaccaagaccatgcttaaaaatgaaggctttggtgccttttacaagggtttgtcagctgggcttctcaggcaggcaacctatacaacagccagacttgggtcattcagaattttgacgaacaaggccattgaggccaatgaagggaagcccttgcctct

SEQ ID NO: 618 - DNA, 424 bp, Nicotiana tabacum
aaatctcaggtaaaagtgatgttacagaagctgcaactatggatttattgacaattatggaaaaaccctctattgaaactaaagaacaagaacaaaaatccacagatcccgttcttcagcgtgctgcaacagagttttctagagatatggaggtggccgtaaatgagcccagcacgagcaaagaggcgccaaaggagcctaaggcagcacaattgactatgttctatgatggtaaagtgatagtatttgatgattttccagctgacaaagctagagcagtgatgttattggctagtaaaggatgccctcagagttcatttggcacttttcatactacaaccatcgacaaaattaacacatctgctgctgccgctgccactgccttctttgacatgtaataaaactgatcatcagcttaaaccaa

SEQ ID NO: 619 - DNA, 478 bp, Nicotiana tabacum
tccacgtcatcattaccgtcgccgacgattttgaagaggaaaagaccggcgaggattacgattccgattgcatctttgagattagaacaggttgatcaaactccgagggaagagagtagtaggttagatgaagtggaagttgaaggagaaggatactctgtgtattgtaaaagagggaaaaagagaggtgatatggaagatcggtattcggccatagttgatgaatctaaggacggctctaaacaggccttttttggtgtatttgatggacatgggggagcaaaagctgcagagtttgcagcaaagaatttaggcaggaacattataaatgaagtagcgttaaggagtgaagacggagttgaagaggcagttaaagagggttacctcactacagatacagacttcctaaagctaaatacaaatggaggaagttgttgtgtgacagcactgattacaaaaatggacaacttattgtatc

SEQ ID NO: 620 - DNA, 242 bp, Nicotiana tabacum
gagggtgaaagagcaagaaccagagacaacaacttgctgggtaaatttgagctctctggtattcctcctgctcctaggggtgtgcctcagatcacagtctgctttgatattgatgccaatggcatcttgaatgtctctgctgaagacaaaaccactggacagaagaacaagatcacaattaccaatgacaagggtaggttgtcaaaggaagaaattgaaaagagggtccaggaagcagagaa

SEQ ID NO: 621 - DNA, 234 bp, Nicotiana tabacum
tgttgaaggagactagtgaagcgtgcttagcagctcttatacggccttcgtcgcatcatcagaggcgtagagccgatttccaacctcgtcccagccggctttccaggatgtccaaagctgaggatctgtgatgttgtgttaaggttacaggtttgatattttaatataggtatttgaagctattcagttgagagtttccggcgatggcgtcagatcccggctgcggtttttata

SEQ ID NO: 622 - DNA, 284 bp, Nicotiana tabacum
agtaatgatgtagcacagtgtgttatggagaaggcgaaacgattttgcaaggacttggatggggttaaggtggagacgatagtggagcgcggtgatgcaagggacgtgatttgtcaggcggcggaaaggttacatgtcgacatgctcgtcatgggaagccatggctatggtgtcatcaagagggcatttcttgggagtgtgagcaaccactgtgcacagaatgtcaagtgtccagttttaatagtgaaaaagccaaaaaccaatggcagcagcaaatagatttt

SEQ ID NO: 623 - DNA, 432 bp, Nicotiana tabacum
tctattatggtcatgcagcagctccaaatgacaagacattgcgagagggagatatggctcttcttgatatgggagctgaataccacttttatgggtccgacataacttgttcctttccagtaaatgggaaatttactcgtgaccagtcacttgtatatactgctgtcctcgacgctcacgatgctgtcatttctgccatgagccctggagtgagctgggtcgatatgcataaattagctgaaaagatcattttggaatcactgaagaaagggcacctacttgttggggatgttgataaaatgatgaccgagcgacttggtgctgttttcatgcctcatgggttggggcaccttcttggaattgatactcatgatcctgggggttacttgaagggagctgaaagaccaaaagaacctggattgagctctctac

SEQ ID NO: 624 - DNA, 626 bp, Nicotiana tabacum
cgactatcagctgatggacatctctgaagatggttttgtgtctcttcttactgaaaatggaaacaccaaagacgacctcaggcttcccaccgatgaagccctgctgagccaggttaaaggtggatttgaggaaggaaaggatcctgtgttgtctgtgatgtctgcaatgggtgaagagcagattgccgctgttaaggacattggtacataaaacaatgtattataaactcgttgatgcttaaacactctgtttgacatcaactgattataaaaagttctttttacagcacagcattatctaatatctagcacactgtttgcagagcttattcacattggcaaaccactgacttcacactccaaaatcaagttgcgacaagaccatcttttacttcctctcctccttcccccagttgccaaacaacgtctttcaatccagtagacaggttcttgtaaaacttgtgaaattccaaggtatctcctccagccttgcgaagctcaaccatgtatagtgaaggtgccaccatcgtaaatctcggttgcaacggataaatgacctttgcgcccgctcttctccccctgaagcttaatcttgtagttattcttcctcacattgaagcccagag

SEQ ID NO: 625 - DNA, 241 bp, Nicotiana tabacum
tctcctaacttgcgttgtgctgctttggatgccttgactcaccacttttttgatgagcttcgtgatcccaatacacgcctgcctaatggacgtttccttcctcccttatttaactttaaggctcacgagttgaagaacgtgcatgcagagacattattgaagttggttccagagcacgccagaaaacagtgcccgtcccttgggttatgagttccttccgaatgatagaaataatttaagt

SEQ ID NO: 626 - DNA, 309 bp, Nicotiana tabacum
acaggagaccacaaacaatgcagtcaacagctgttcaacgtggatcagtggcttagcaccgatcgttcgccgtatcagttgacggccacaagaaacaattgtaggcgtatgtcaggtgaccaacaacccattgttgttgatgtaatttaattcgagttcattgggctacttacaaactatatacttatagaatttctctccttctttctttgtatctctctctttcaattatataccagtgtgtggcaattttagcatcaatctaatgttgtataatctgtgaagcccatttaggccaaggcctgatgt

SEQ ID NO: 627 - DNA, 352 bp, Nicotiana tabacum
ccaattccttctcgtgtcttgacaggaaggcgtgaaatgtgtgtcattgaaaaagagaacaacttcaagcaggcaggagagagatacagatcctgggaacctgacaggcaagacagatatgttagcaaatgggttgagcatttatctgatccccgagtcacttatgagatacgcagtatatggatatcatacttgtctcaggctgacaagtcttgtggtcagaaggtcgcttctcgtctcactgtaaagcctacaatgtgatgaagctaagatgaaaacgctactgggaaaacgtttcaagttgcatactaaaccaagaaaaacattacgtttgtttgttgtgctataaagt

SEQ ID NO: 628 - DNA, 371 bp, Nicotiana tabacum
ttcaatgtgatcggctcagaccctgaaggaaggttaggagaagctccacggccagaattacgtgagcaaggtcggatatctggtgcttgttttgatgcagccaggggcataattccaggattgaagataagaggagtagattacatcacaccagatggcacttgtgtaagagactatatcgatgtgactgacctaattgacgctcatgttaaagctctcgagcatgcaaaacctagcaaagttggcatctacaatgttgggactggaaaaggtagttcagtgaaacaatttgtggaagcttgtaaaagggcaacaggagtggacataaagattgattacctgagtagacgtccaggagactacgctgaagt

SEQ ID NO: 629 - DNA, 468 bp, Nicotiana tabacum
aggaagatttactgcatactccgaaaattgacatagcacaggaagcactaaagttgagttccttggagttgcgtgcaggggtgaaggaccctctccctgaggcactggaactagctaaggctctgatgtccttgggcagggatagtagtgctcagcaacctgcagaaaatgaaaacggaagagcccctcatcttgtggttgatagtaatggagtggttcaagctaatggcgggaatgaagatgaccagatcattggtcttcaaaatgctgcacccaagccaagcttaatggctcgaaacagcactgctcatacatttgagtggaacgattcaatcgataacttaagcgaaggatcaccaagtagtgggaggaggtttacgttacctacccccaggaggacgaaggtttcccccctgaagaagtatggatttaaaaaagttacaaagaggaggaaatccaagagatgga

SEQ ID NO: 630 - DNA, 346 bp, Nicotiana tabacum
tttgatcgatcaggtatgaaggcaatagactgtgcatatccatgcgatagaacatgtcacaacctgatctttagatgagccttaaaatcaaattctttttctgctaacagcagaaatatgttatcatcttgatagtgaaataccccttccaattaacttaagatttacacaagtgtaacaaagttggttgtagaaaataatgtctagcatttatccgcgaatgcatttagtatagtaatgctccacttatgtcctttttgggccagttagagcaggagatttttatttatcattttctgtatccacccaaaatttattgaattgtaaaacaaatcaatccaatgaa

SEQ ID NO: 631 - DNA, 342 bp, Nicotiana tabacum
aattatgtcaagcttgatgggctcaaatggtttggtcttggcaacagccatggctgtctctgccggcactgtgcttctttttgatcttcttcaggaaaagtatttgtcaactattcagtttgaacttacaaacaataaacaagaatattccccacatggagagcatattctaaagtcttgtttatcttcaggtgaaaagaacaaagatttgaggagaagaagagagttcattttgcagctaatgtgaaagattcaaatggaaatggcgaggaatatagaagggaatttaattatagcaaagttcttagtaattcttgtggtatgccagaatcgtagaacttt

SEQ ID NO: 632 - DNA, 315 bp, Nicotiana tabacum
atgcgatgcgggacacctagagggaaagagaatgcagttgctgcgttgcttgaattatgccgtggtggtggagctgctgctacagagagggtcttgaaggctccagcattagcaagtttacttcagacattgctctttacaggaacgaagcgcgcaaggagaaaagcagcatcgcttgctagagtatttcaacggtgtgagcatgcatcaatgcattatggcgggttaggtgtaggatatgcttttgctggagactcagctacagttagggattcaacttttgctggtgatgtctcagtttccatgtccatttca

SEQ ID NO: 633 - DNA, 203 bp, Nicotiana tabacum
acgtgtcggcgggttagagagcctcgtggcacttcacttgagtggccgtcttgttcctaggcttgtggaagttggtgtcatcactgatgtggtattgtaaaattaagataattatttcgtgtttttatggagctatgttttgtaattcaattatcgtgaaaaagaaaaaaaaaattatacccttaggaaaagaaaataattaa

SEQ ID NO: 634 - DNA, 362 bp, Nicotiana tabacum
aaagcagatatattactttgtgaatctggtggagacaacctagctgccaacttcagtagggaacttgctgattacataatctacataatagatgtatcaggtggtgataaaattcctcggaaaggaggtcctggaattacccaagcagatctccttgtgataaataaaactgatttggcaccagctgtaggagcagatttgtctgtcatggagcgtggtgcacttcggatgcgggacggtggtccttttgtttttgctcaggtgaagcatggggttggcgtagaggacatagtgaaccatattttacaagcttgggtagttgcaaccggcaataagaagcactgaaatgtcaacgaaaacta

SEQ ID NO: 635 - DNA, 276 bp, Nicotiana tabacum
aaagctcacaggaacatcatttttctctgttgcaacgtgagactgaaaagcttcggaacgacattgaaaaaatgcgcagtgaactaaggtatgagattgacaagcttactgccggccaacgtttggatttaaatcttgaaagaggacgcattcgtgatgagcttgccaatcaaaatgcagaaactacaaatcttacaaataagcttgatcgggaaattcatgcattgagggcacaactcgaagctgcaaaatatgaagtgatcaaatactgtatag

SEQ ID NO: 636 - DNA, 532 bp, Nicotiana tabacum
tagacagttctaaaagcagaagaaatggaacgttaggggtgaataataataataataatgtaatggaggatgttttcaaggtgatggacaaagatggtgatggcaaagttggggttgaggatcttaagagttatctgaattgggctgggcttcaagtggatgatgatgatattaaggccatgattaaattgggccgtggtgatgaaaatggtggtggtgtcacctttgaaggttttctccaaattttgtctcttcgatttgttgctttgatgacgatgataaatgtcagattaggtgaacaagttttggtttactttgtatttttcaatgatttgttttactgtgctgcttcatatgctattggctattccgagaattctatttgaaaacaaagaagaaaaagagttgttccgccagcattttgttattatttttttatattgtttgttttcgttaagtgagaaatgatgttcgaatgaggtttatttaagtcgagttttattcttagaattaaagccgagtatatttaagg

SEQ ID NO: 637 - DNA, 314 bp, Nicotiana tabacum
aagacactctggctgcaggatagtccaactgaggatataacaagtattctctatgatgtctttgattattttgaagatgttcgtgaacaaggtgggagagtttttgtgcactgctatcagggagtgtcccgatcaacctctttggttattgcatattttatgtggaaagaggggttgagctttgaagatgcattccagcatgtaaaagctgcaagaggagtgacaaacccgaatatgggttttgcttgccaactattgcagtgccagaaacgagtgcatgccctacctgtgagtccgagttctgtgcttagaat

SEQ ID NO: 638 - DNA, 353 bp, Nicotiana tabacum
tctacgcaatatacagcaaaaaggagaaggccatattaaaggagcaaaaacttccagagatacaaaagccagaagtcatagtggtggacgagaacatgaacagtaaaaagcttccagaactgacacaggaacagattattgacatagtgaagcttggtttactggtttgctcagataaagttaacgtagcctcgcttccacatgatactacttgtggagttaaagcacctaaagtagaaaacatgcccaagctgcaaactgtagaagcctaggacagttaatgtcaggcttggaattagcattgatctcagtgcagcatatatatagttttcctaagtaatcctggtgtgtat

SEQ ID NO: 639 - DNA, 356 bp, Nicotiana tabacum
ccaaatttctgctgcttcaggtgggaataaggatagtgtttctgaggacattgatactggaggagattctcttccagatataagtcaaatttctaaggacgcagacagcatgtccgatattctcatgcctcgtaaaaagaggaagctactagatgctatgaagatgggcaaagagaagaaacaagctaatgttgaccgtttgaagcagaggaacagaatgattaaagaaggaaaaatatcagagaaataaggaagcagttaattatgccagtcatttaaaattattcactgcgttgtagtctttcgtttgcttttcttttggactggtaattctataatcttgtatattggtttat

SEQ ID NO: 640 - DNA, 429 bp, Nicotiana tabacum
taggtcgtgatggttctatcctcattgaaggttcagacgctgcgagaactgctatcccaaacagaaatttgaaaggattcgacgttattgaggatgctaagacgcaaattgaagctatctgtcctggagttgtttcctgtgctgatattcttgctctagctgctcgtgattccgttgttgcgactaggggactgacatggtctgtgcctacgggacgtagagatgggcgagtttcgagagcagctgatgcgggtgacctgccagctttttttgattctgtggatattcaaaagcgaaagtttcttacaaagggtctcaacactcaagatcttgtcgccccttactggtgcgcacactattggaaccgcaggttgcgcagtcatcagagacaggctattcaatttcaactccactggtggccctgaccct

SEQ ID NO: 641 - DNA, 449 bp, Nicotiana tabacum
gacgttgaacgagacaacgaaattaactgcaaagtctgcgggctgcaaattcttggctcggcttatggttgtcaacgttgtcaattttacctacatgtttcgtgcttcgatctgccccaaaagattcagcacgattctcatcctgctcatcctttaacgcttcgaaatctttcctactacaagaactgtggaaaatcttgtgatgcttgttgtgaagatatacgacgaagttttctatactgttgtgatccttgcaattttgatcttcatgttacttgtgctaccttatatagcattgcgaggagaaatgattcaccaaaggatactcttcgactttactactcgtttcctgtcagtgacaacaatcaaatgcattggattgcgcgatgcaatgtttgtaacaagaaggtgtctaaggaaggttggttatattatagcaaggatactgg

SEQ ID NO: 642 - DNA, 500 bp, Nicotiana tabacum
gtgatatcatatggcaggagcgaagttgcttggtctttggtatagcccttttagtcacagagttgagtgggctctgaagattaagggcgtggaatatgaatttatagaagaagatctacaaaacaagagctctctgcttcttcaatccaaccctgttcacaagacaatccctgttctctttcacaatggaaagccaatagctgagtctatggtcattcttgaatacattgatgaggcttttgagggtccttccatcttgcctaaagacccttatgaccgtgctatagctcgtttctgggctaagttcctcgaggataaggtgccagcggtggggaaaagtttctttctcaaaggagaggagcaagagaaaggtaaagaggaagcttatgagatgctgaaaattcttgataatgaggtcaaggataagaaattctttaccggtgacaaaattgggttggctgatattgctgcaaatttttgtgggactttggctgggagtt

SEQ ID NO: 643 - DNA, 293 bp, Nicotiana tabacum
agttcgtgacatattttgagactatgccatggctagcagtcccatatgatgatccaacaatcaagaacttagctaagtattttgatatccgagggattccaagcctagtggttttgggccctgacggaaaaacagtgaccaaacaaggtaggagtcttatcaacttgtataaagggaatgcttacccattcacaaagacaagagtaggaatactagagaagcaaatggatgaagtagcaaaaggccttcctaagacagaacaccattcggggcatcgacatgaacttacgtta

SEQ ID NO: 644 - DNA, 444 bp, Nicotiana tabacum
aaagatcaaggatttgaaattttagcatttccttgtaaccagttcttgtggcaagaacctggaacaaatgaggagattcaggaaactgtatgcaccaggttcaaagctgaattccctgtatttgaaaaggttgatgtgaacggggataatgcagcaccacttttcaagttcttaaaatcaggaaaaggcggtttccttggaaatgctattaagtggaacttcaccaaatttcttgtgaacaaagaaggaaagattgtggaacgatatgcacccaggacacctcctcttcagtttgagaaagacatacaaaatctgttgggttcttcttgagcatccaggattattgaaaagcatctgttattctatcagccaagtgtgaaactccagcctttaattggaatgtttaattagtatatctttttcatcttccctgcctatgagctt

SEQ ID NO: 645 - DNA, 658 bp, Nicotiana tabacum
  misc_feature (575)..(575): n = a, t, c, or g
  misc_feature (578)..(578): n = a, t, c, or g
  misc_feature (581)..(581): n = a, t, c, or g
  misc_feature (603)..(603): n = a, t, c, or g
  misc_feature (609)..(610): n = a, t, c, or g
  misc_feature (629)..(629): n = a, t, c, or g
taacttcgcttctgccgctgctggctatgacgataaaactgccatccttaaccatgcaattccattgtcaatacagatgcaatattacaaggaataccaagccaagctaacaaaagttgcaggcagccaaaaagcggcatcaatcctaaaggatgcgctctacttattaagcgcaggaagcagtgatttcttgcaaaattactacatcaatccttatattaacaaactctatactcctgatcagtatggttcttatcttgtcggcatcttcactagctttgtcaaggatttgcatgcgcaaggagcaaggagaattggagtaatttcactgccaccattgggctgtcttcctgctgctagaacattgttcggatttcacgagagtggatgtgtctcaaaaatcaatacagatgcccaacaattcaacaagaagatgaattcagccgctacacaattacaaaaacaactcccaggccttaagattgctatctttgacattttccagcccctatatgacctcgtcaaatctccatcagatcatggattcacggaagcaaatagaggctgttgtggancangancagtggagacgacgtcgttatngtgcannccaagtcaccagggactgnagcatgcactcagtatgttttgggatagt

SEQ ID NO: 646 - DNA, 461 bp, Nicotiana tabacum
aagaatggaccagttgaggtctcttttactgtttacgaggatttcgctcactacaagtctggagtttacaagcgtgtaactggtgatataatgggaggccatgctgttaaactcatcggatggggaacctccgaggatggagaggactattggcttcttgccaatcagtggaacagaggctggggtgatgatggttactttaagatcagaagaggaacaaacgaatgtgaaatcgaagatgaagtggttgcaggattgccttcagccagaaatctgaacgtggaacttgatgtctctgatgctttccttgacgccgcaatgtgaatgctaattcttcaactaaacactaaatagaatgcaagtttctgaagactggggaacaataacatattaagtttattattcttcccctcttaagttgtctgcaattgttccactatcttattatcagtggaagtgct

SEQ ID NO: 647 - DNA, 331 bp, Nicotiana tabacum
agaaaggcaagtggccaaacttatggaagaaaatgttggttctgcaatgcaatttcttcagtctaaagcactatgtattatgcctatttctcttgcatcagcaatttaccactctcaaccaccagatacatcaagtcttgttaagccagaaactaatcctcctccttagagacccaaaactggttcgaacactaaaccggctcgaacactacggttattttaaaaaaaaataaaaaattgttagaaaggtgacaacatgctaatgaccctgagaattctctttgggagtggatggtcccacagccatggttcctgctattacttattaaga

SEQ ID NO: 648 - DNA, 350 bp, Nicotiana tabacum
gtccggattcgaggattttgttcgagtcgatggagaaattgttaattctacaaattcagaaggttctgatgagagcgtagtggaagaacgatggggttgatgaggtttcttcggtgaatgaagaaggtgaaggtcaaagtcaaccatacgaaaggagggttttgccggaggaactttcgaggaatgtaatgacactcacttgtgaatcttctgccgatggaggcatttgcgatgtgtatgttgttggcacagctcacgtttctgcggaatcctgccaagaagtcgaagccgtgatcaattttctgaaaccgcaggtcgttttcttggagttatgctcgggtcgagtggct

SEQ ID NO: 649 - DNA, 251 bp, Nicotiana tabacum
aatcatcaaataaagaggaggtgccttctactgtatttgcatcacagagcccatatgtggaggctccacagtttgccggtggtcaactcagctataacttccccatgccgactgcaccaccaggtgcacagagacatgcatagatacggagtttgcgaagaatttatgtagcttgtgaatggtagtgcttgttgttgtatggctttttcttagggaagagagggagtttgagcttcttatgtatccagtgt

SEQ ID NO: 650 - DNA, 271 bp, Nicotiana tabacum
ctaattgcaactttgatggtgcgggtagaggttggtgccaaaccggtgattgtggtggagtcttagaatgcaaagggtggggtaaaccaccaaacactttagccgaatacgcgttgaaccaattcagcaacttagatttctgggacatctctgtaattgatggatttaacattcctatgccttttggcccgactaagcctggtcctggaaaatgtcacggaattcaatgcacagccaacataaatggtgaatgccctggttcacttagggt

SEQ ID NO: 651 - DNA, 513 bp, Nicotiana tabacum
ccattagttgatgaagatgcaggaagctctgcgccatttatgaaactgatgtcttgttttcattgctttcattgtgagcgcatcatcagatggtggaattggcttcaactattaaaagaatctgatgcccctacggactctggttctgcttcgtcttctaggaacagggatcaggatgaagaagatgtggggaagtgcccggtttgtcgcaagtcttttctagcgaaggacattgagcacgtgctagacttcgtgaagactcagcatgctgtgacttccagtggatctgaagtcaacaatgaagacaagattctttcctcggactcggaaaaactaagaagaaagaaatttgatgctattctgaaactccagcaagagaagggtggcttaattgaaataaaaaagcatgaagtgttgcggccaggtatttatcttccacaacctgctgcattaccctcaactgcacccaccgaagaggcaaatgagcaaaaagacagagatctggcagccaac

SEQ ID NO: 652 - DNA, 241 bp, Nicotiana tabacum
ctaatctggaaaccacattcttaccagaaggcagtcattttgtgcaggagcagtttcctgaacagatcaatcagttgattatcaccttcctcaaaaagctcaaatgatgaactgctttccagcgatatcgaataaagggcgacccaatgcacgaaactcccgttatgcacaaggtttgagaaggacaggcatttgggtcttatttttcacagttgaatgttgatctaatttttatcaaaca

SEQ ID NO: 653 - DNA, 392 bp, Nicotiana tabacum
caaaacgacaatggcgcgatggttcccctacgtgctcacactgttttgatctccactcaacatgacgagactgttacaaacgatgaaattgctcgtgatctcaaagagcatgtcatcaagcccgtgatccccgagaaatatcttgatgtgaagaccattttccacctcaacccttcgggccgttttgtcattggaggaccccacggtgatgctggtctcactggccgaaagatcatcatcgacacttacggagggtggggtgctcatggaggtggtgctttctcggggaaggaccctaccaaggttgacagaagtggagcctatattgtgaggcaagcagcgaagagcattgttgccaatggtcttgctaggaggtgcattgttcaggtttc

SEQ ID NO: 654 - DNA, 341 bp, Nicotiana tabacum
ttcagacagtccctgcttctcctccgattaaattgtccagatgcagcgatgaggagtttacatttggcccgccagcatgcatctagtgaacatgaatgtttggtctatgagggatggatcttatatgatactggccactgtgaagaaggtctacagaaagctgaagaatctattcgcatcaagagatcttttgaagcatactttctgaaagcctatgctttagccgactctagccctgatgcatcttgttcatcaactgtcatatcacttcttgaggaagctttgaggtgcccgtcggataggcttcgcaagggtcaggccctgaacaatcttggcagtgt

SEQ ID NO: 655 - DNA, 207 bp, Nicotiana tabacum
gcaactccaagagatcgttccgtgtaaaatccgtgccgaacgtggttgtgctactcatccaaggagcattgccgagagggtaagaagaactcgaattagtgaaagaatgaggaaactgcaggagcttgtcccaaacatggagaagcaaactgaaacagcagacatgttagatttggctgttgattacattaaagacctccaaaaaca

SEQ ID NO: 656 - DNA, 398 bp, Nicotiana tabacum
tatgcgggctatgcagggtatggaaattatgcacaacctccacagcaacagcaacaaatttcgcagcagccccagtaatctgctggtcaaaggtattgctgagagcttcccgtcatggtaaagcattgttgttgaaaagcggagcacatgtctgttgaatacagaggtagtatagtttgctatctgtgggttggttcttggatgatacatttgtgttctgtgcagctgtctgtttcaatagctggcttcttttctatttcttttttctcgctacattgctcttgtgccatttttggttatatttgtgatctagctatgttagatctcagatgagatcaagggcatcttttttttttaattcttacatggtggttttggcatgtcagacagttgtgtat

SEQ ID NO: 657 - DNA, 297 bp, Nicotiana tabacum
ttggcattcttggagaaaatactgaggttgttctagcagagtgctcaagatcatttggcccatggatgatggcacatgctgtagagttgttgacagctgggagcactcatgcggaaattcttttgcatgaagagcagtccaaactggggggaatcagcatagaagagctccataaacttgtatatgcacaagttctgtcttcccatgcgttcacatggcaaattgctccaatatacttgacttcatgcataaaacaagggattggattgttggatgaatttgctttacaagcagcct

SEQ ID NO: 658 - DNA, 363 bp, Nicotiana tabacum
  misc_feature (110)..(110): n = a, t, c, or g
taaccctagaagaagcaaatggtgcagcaactggaaagacgaaaaaattgattgatatggctaacagaagaggaccttacttgggattagtcattcctaacctgtttgangatgaatcctcttcttcaacaccctagttacaaacctactaaccttaccattgactatgcagggaggatgatttcggtttggatatattgataaccagcctgttgttcttgttatgactggacttgccatgctaaatgcaggcataacaacacaactgttgctagcattgttcaaggttaaaggtgtggtgcactatggaattgcaggaaatgcaaatccctctctccatattggagatgttgctattcctca

SEQ ID NO: 659 - DNA, 303 bp, Nicotiana tabacum
gaagctgttttcattcgttggtgctaaacgtgagaaaatcaagaatgattttcgaggggtattaatggattactgtaaaagcgaggaagattgttgggcggttgattgcgccaccggcatatgttccgacggagctccggcgataatggaaacgtttcttggttcagatttctgtttacaaccaagaggagatgggttgactagacggtcaatgtttgactgtatgttggccggttcaattccggtttatttttggaaaggaacatttaaaggtcaatatgaatggcatttgccgtggatgcc

SEQ ID NO: 660 - DNA, 424 bp, Nicotiana tabacum
atttaacatgctttcaagtttcaaccacaaaaaaaaacaatatactaagaataaaatagtgaagaaggagaattggaccttcactaatgtaaaaccatctttagcataatggaggaactccatagaagttggaacaaaagctacaaatcgcgacagacccacgaccggaaacctcgaatctcgccgggtaaagctcgtcggaaacctcgactcgaaacataagcatgagacgatactcgacttggaaaatgccgctatttatgtaaaaaagagggactactttaaggtgttttagagatggtcttgggtttgttccatggaagcttcaaggtgagctttgggctggtattcatggctgcgtttacatggagtttcagcttgtttttaggtcgtttttggctgattttcgctgggatattgagtc

SEQ ID NO: 661 - DNA, 386 bp, Nicotiana tabacum
cccgacttggagaacaccaccacctttaccatcattgagggagttgcacctatgaagaactatgagggatctgctgagaaagcaacagaaggaggaaatggctgcaagtgcggagcaaactgcaaatgtgacccttgcaactgctgatgaacatggtcattagctggcccaaaaatatattatgtgttttaaaagctttgtagtattaataaaactacaaccatgaaactgaccatctccaaatctttttgacaaggtttgtttgatgttgtttcatggtttttctgtttggttttctaatatgatatttgtatgaaaggaagctgatttgggctgtaacacgaacttatcaatatatagaatacaagttggcttctcctttaaaa

SEQ ID NO: 662 - DNA, 465 bp, Nicotiana tabacum
ggatttcaaacccaaatggtctgaattctccggcgaactttgccgccgacgtatcttcttctctgccaactttcgctgccgatcgtattatcagggagtttcgccatggaagatacagagtcagttgcaacattggtggactctacaacatccaagatacagcaactacagaaagcattcgctgagttggaaagtcaccgtgctgttactctcaacctgcagtggaagcaacttgaagagcactttcatgggcttcagaagtccttgaagaggcgtttcaatgaactggaagaccaagagaaggagtttgagacaaaaattttccaatctagggagatgttggagaagcgtcaagcagctgttattgctaaagagcaagcttcacttcagaggctccaggggaaaagagatgctgcagtttccgctattgctatcgctcttgagaagcataggaagccttgttct

SEQ ID NO: 663 - DNA, 252 bp, Nicotiana tabacum
ggtgagattgtgtaattgtcttacatcttgtgtggcctgtttttgaattttcagaaaatgttgggtgtatttagcagttccattgtttccccgcccgacgagcttgtggccgccggaagccggacatccgatcgcctaagatcaaggcggaagcatctggtaaaaagatttgttcaaaataattcgtcggcggtttctatgcagatcggcgatcatgtccagctcgcttacactcactacaacgagtccgct

SEQ ID NO: 664 - DNA, 271 bp, Nicotiana tabacum
atccgtgcaacagttttgtgaccagctgtttaaaaagagagatatttttccacccaaccaccacaggctctcttgaaagaagaaaaagaacaaggggtgccttttattccaattgtgcagtttttttttctttgttaaagaataaatttcgtcaaagaaaaagaagctgttctactggatttattagcaaaatatgttcttcaattttggctaaattcttcccatttagaagtcagcagcaccatattactcccttttctcagggcatgat

SEQ ID NO: 665 - DNA, 490 bp, Nicotiana tabacum
tttaaccggttgaaagaactctctacaaaccttcagttggctccacgtttaaggtgtatggttcttgatgtgctggatttacgttccaataactgggtgcttagacgggaagaggggaaaccaaaaatcatcacagagattcacacggaagcaaagaccttgaagttgcgttctggtgccactgcaagcatgagaaactcacgtggtcctcaaggcggcttgatttctagcggctatcggcgaggaactggtggtatgacgcctggaatgccgggagttaggaagatgccggggaggacctgctcctatactagtcaaagccgagcagcgatgttcagcagctcaaaaaagcgtgtcttgaagactgttatgggtggactcaatgagccgactctgaagaagtttgatctcctaaatagacaattgataattacagggataactagtgcagacattctgaagggtgttgttaccttgatatttgacaact

SEQ ID NO: 666 - DNA, 417 bp, Nicotiana tabacum
agttaaagaacttgaggcatacacagatgccgtacaaagatgggatatcaacgaaattgatcggcttcctgattacatgaaaatcagttataaagctattctagatctctacaaggattatgaaaaggaattgtctagtgccggaagatctcatattgtctgccatgcaatagaaagaatgaaagaagtagtaagaaattataatgtcgagtcaacatggtttattgaaggatatatgccacctgtttctgaatacctaagcaatgcactagcaactaccacatattactacctcgcgacaacatcgtatttgggcatgaagtctgccacggagcaagattttgagtggttgtcaaagaatccaaaaattcttgaagctagtgtaattatatgtcgagttatcgatgacacagccac

SEQ ID NO: 667 - DNA, 322 bp, Nicotiana tabacum
gtttaaacgtgaatttgaggcttttggtccaatcaagcgggttcgtttggttacggacaatacaaacaataaacccaggggttatgcttttattgagtatgttcatacacgggatatgaaagctgcatataaacaagctgatggaataggaagattgataatagaagagttctggttgatgttcgaacgtgggagaacagtccccaattggcgaccccgaagacttggcggtggacttggaacaacaagagttggaactgaagatgttaatagagaggtagttcagattggaagggcggcatctcgctccgaagagccaaga

SEQ ID NO: 668 - DNA, 399 bp, Nicotiana tabacum
gtgttcagctaagctagcccgtcaagcacagagtaaagaaaaaacattggctaagatggagcgtggtgggcttacagagaaggtggggagggacagtgtcttggttttccggtttactgatgttggcaaacttcctcctcctgttttacagttttcggaagtcgcatttggctacacacctgagaacctcatctacaagaaccttgattttggtgtagatcttgattccaggatagcactagaggggcctaatggagctggaaagagcacactgcttaagctgatgataggggacttattccccactgatggcatggttaagcggcataatcaccttaaaattgcgcagtatcaccagcacttggctgagaagctagacatggacatgtctgctcttca

SEQ ID NO: 669 - DNA, 235 bp, Nicotiana tabacum
tccaagatcgtaacggctcttcaaaaaacgcaaaatggacagtcgaattcgtcgaaaaaaccgacaacgttatacgcttaaaaagttgctacggaaaatatcttacagcgtcaaatcagccatttcttttaggtatgactggtcggaaagttttacaaactgttccaaataggcttgattcttcaattgaatgggaacccattagagaaggacatcaagtgaagctaaggacaag

SEQ ID NO: 670 - DNA, 437 bp, Nicotiana tabacum
tcaatccactgttcttcctgatccttcttccttttttgcccctaatctcctctcaaatccattacccacaaattcttttttccaaaattttgtcctcaagaatggtgatcagcctgaattcatacacccttatattgtaaaatcctcactttcatccctcactctttgttacccatctcagttccataatcctgctttcatttaccaaaattttatagctgatttgactatcactgctttgaataaccccaatccaaattcaccccatgtaatttcatcctttgatgatcttagtgtcacattagaccttccttctagtaatctcaggttctttcttgttaaaggttccccctttattacgtgtaacgttcttggaaatgtagcgctttcgatttcaacaattcatgccattcttgagtgtaattcgaatagtaatc

SEQ ID NO: 671 - DNA, 334 bp, Nicotiana tabacum
tcgccttcgaacagcatgtctacaattgaacaaggaaatgtggtgtcacctatttaggtgtcccagcagaacaagaaccttgtccattttgcagaatcaaaggttgtttaggctgcgatattttcggaacaacatctaatgctgctgctgttgtcgctgctgacgataacaagaagaatagtacctgcccgggcggccgctcgagccagatgggtaactatccgatgggccaaatggggaatatgccggcagctcaaggactacctgcccccggtggggccgggtattaccccgggatgggacagggcaacccttatagccaacaacaacaaca

SEQ ID NO: 672 - DNA, 402 bp, Nicotiana tabacum
ggagtcaagattgtgttcacgggcttgcagttagtttagaaggccgcgaaactgcttggaaatggttgcaagacaaatgggatcatatccacaagacttacggctctggattcctattaacccgcttcatcagtgcaacagtgtcaccgttctcatcctatgagaaagcgaaagaagttgaagagttttttgctagccgcaccaagccttacattgcaagaactttgaagcagagcatcgagagggttcacattaatgcaaactgggttcaaagcattcaaaaggagaagaatctttccgaggcagtgatggagctagcgtataggaaatactgaagcagctgttgttgaacttaatgttccctttagagagtttctagtttccatcaataagttaatcatg

SEQ ID NO: 673 - DNA, 235 bp, Nicotiana tabacum
ctgcccgggcggccgctcgactggttttaccacagagaacatcgattatggtttatgagggtcgccaacatggagcctcttgtcaagaccagcgcctatgagagaggatcttatatatgttttgatccaaacacatgggaaacaatccgcaaggataattttgtgctccactatgagatgttggaaaatagacctgttctacctcagcactaacgattctgttcagcttatagtt

SEQ ID NO: 674 - DNA, 338 bp, Nicotiana tabacum
gtgcctctttctattaccagaccaagtgctgaggagtggccttgtgctgggtcggatgatcttggcgtatggcctaataatccccctactccaggtggtaggcttggaccagtcagcacccgtgaaggttcagctactaagcaggctccgcgagaatttgaattcaagaaagacaagcttgctttcttcaataaggaatgctctaagattgtggatcacatttatttaggaagtgacaccgtggcaaagaatcgtgatattctccatgagaatggaatcactcatgtcttaaactgtgtagggtttagttgtcccgaatactttaaggatgatcttgt

SEQ ID NO: 675 - DNA, 240 bp, Nicotiana tabacum
atatgacagcgccaaaacttgcaagcccgctcttgccactgctgtcttcagcaccgtatctttcttgcttggtgctgttacatctgtggtgtctgggttccttggaatgaaaattgctacatatgcaaatgccagaactaccttggaggctagaaaaggtgttgggaaggcttttattgttgcattcagatctggtgctgtgatgggtttccttctcgctgcaaacggtcttctggtttt

SEQ ID NO: 676 - DNA, 470 bp, Nicotiana tabacum
agcatggtgcaagaagaggttgaagcgaagacagcaaaaggctcttccagttgcacaaatggtcttctttggttgacaagggctatggatttcttggtggagctgttcaggaatttactggaccatggggactgggcgatgtcacaagcttgctctgattcatacggcaagacgttgaaaaagcttcatggatggttagcgagttcaagttttacggtggcaatgaagctcgctccagataggaagaaatttatggatgtaatatgtgggactggtgatattaacagtgacattggacagttctgcactactttctcaccgcttctcgaagagaaccacaagttcctggcctgcgtaggaatggatggtctaaaagcatcttaagtctaaaggaagtttgcaactcagttgagattcatccacactgtgagaaacttctgaaacaagcatacttcctgctttatcctgtt

SEQ ID NO: 677 - DNA, 278 bp, Nicotiana tabacum
agaagtcggattaggaaattataatgtgattggagatatttctctactggacaaaatggtgatatacgataatgagaaacaacaagttggatggcttccagcaaactgcaacaggctacctatcagtcgtgatcatggggaatattattatgatgcataccctaccaacatgggcatattcgaacagatatgtcctgcaaagtttgattcttcaaaacagcaggcaagaaaataaggtgacaaagtgagaagctaatgcgtgcttcgagccatattct

SEQ ID NO: 678 - DNA, 411 bp, Nicotiana tabacum
aaaatgttcttgattacctccagaatgaatatcccgacatggatgtcatcggcatatctgggaacttttgctcggacaagaagccagcagcagttaactggattgaggggagaggaaagtctgtagtttgtgaggcaattatcacggaagaggtggtgaagaaagttcttaaaactgaggttgctgctcttgtggagctgaacatgcttaaaaatcttactggctctgcgatggctggtgcacttggtggtttcaatgcccacgccagcaatatcgtctcagctgtgtatatagcaactggtcaggacccagctcagaacatagagagctctcattgtatcactatgatggaggctataaatgatggcaaggacctccatgtttctgttacaatgccttccattgaggttg

SEQ ID NO: 679 - DNA, 232 bp, Nicotiana tabacum
ttggactctggacgcggagattacctctcttcttcagtaaagcagtatattcaatacctcctcaaggtgaatatggaggtggcatatggaacagaatggcctaaagaagagaaagtaaagcgcagggagatggtttcttctgaagctcgttatatatttgtctatgaaaccgtaaatgcggatgccaacattatgttcaaattatcaaagaaaggaaggagtaatgcagacg

SEQ ID NO: 680 - DNA, 506 bp, Nicotiana tabacum
accagtcttcgataaacttgaagctgagctagctaaagcttgcatgtcattacctgcaacaaagggttttgagtttggaagtggcttcggaggcacattcatgactggtagcgagcataatgacgaattctatatggatgagcatggccgaatcaggacaagaaccaacagatctggtggtatccagggcggtatatcaaatggagaagttatcaatatgaaaatagctttcaagccaacttcaactattgctaggaagcagcaaactgtgacgcgagataaacatgacacagaactcattgctaggggtcgccatgatccttgtgtagttccccgagctgttccaatggttgaagcaatggtagccctggcgcttgtggatcagctaatggctcattatgcacagtgtatgctgttcccaattaatcctgcattgcaggaacctttgcagtcatcaacacccgagtcagctgaggttaccctctgaatggagctgagcagctttt

SEQ ID NO: 681 - DNA, 296 bp, Nicotiana tabacum
ggatcctacaattataggggttttgacctagggaatcacttcaatgaatatgctggctatgactgtgattacagcttatatccaagtaaggatgagcagtttcgtttcttcaggcactatttggatcctgaccaatcgaatgagttatctgagaaggaccttgaagctttatatgctgagaccagtagttacatgcttgcttcacacctatactgggctctctgggctttgatccaggcgaaaatgtcacccattgattttgattacatcagttatttcttcctgcgctataatga

SEQ ID NO: 682 - DNA, 447 bp, Nicotiana tabacum
ttacctccggcaatcctaccgattacgatcttcattactcgcagtttagcttagaaagtttgaacagagaggagaagctgatgggattaggttcaaggaatttctttttgtgcccaaagaagtcaaatgccgaaagtgctggtgctgtaacgacgtcgtcttctagttctagctgtgcaaagcaagctgatacggctactgctagtgctaccaagatagccttgccttggcttaaattcatggatttcttgcgctagaagttcgagattattgtatacaacatattatactatagatgaaagttagggaggtgattaattaagatttaagaccacctcaaaatttagaataatgtttacctattagatttaaaatctttatatgtttgcacattacatgcctgtttaaggtcaactattttcctatcgaccttgatgttgcagtatg

SEQ ID NO: 683 - DNA, 468 bp, Nicotiana tabacum
atgatctcactattggagtcgagtttggggctcgtatggtcaccattgacagccggccaattaaactccaaatttgggacactgctgggcaggaatctttcagatccatcaccaggtcatattacagaggagctgctggcgcacttctggtttatgacatcaccaggagagagacttttaatcatctagccagctggcttgaagatgctaggcagcacgcaaatccaaatatgaccataatgctagtaggtaataagagtgatctgtcacaccgtagagctgtcagtaaagaggagggagaacaatttgcaaaagaaaatgggcttttgtttcttgaggcatccgctagaacagctcagaatgttgaggaggcctttatacagactgctgctaagattcttcaaaagatccaagaaggtgtttttgatgtctccaacgagtcatctggaatcaaggttgggtatggac

SEQ ID NO: 684 - DNA, 230 bp, Nicotiana tabacum
ttggtattgtggagatcatagatggaaaggatctactgaatgagagagcaaatacagaactccgatacctaaagaagaaacccgagtcatggagattggcttgccaaactatagttggaaataaggaaaactctggaaaggtagtggtgcagaggttgcctcaatggaagaagtgaccgcatatgcatacattgaacaggtaattcagcaagaaatagaagaatatacat

SEQ ID NO: 685 - DNA, 532 bp, Nicotiana tabacum
catggacttatggtgcaaggctaccacccagtcataaaggcattatcaaaagacatcgatattcgtttaagtcacagggtcaagaggattacaaatgggtataacaaggtgatggttacagttgaggatgggaggaattttgtcgcggatgctgctattataactgtgcctctaggtgttcttaaagccaacttgattgagtttgaaccaaaattgccagaatggaagcaatctgcaatagcagatcttggtgtaggcaatgaaaacaagattgcattacgatttgataacgtattttggccgaacgtggaattgttaggtgttgttgcacctagttcatatgcttgtggttattttcttaacctccacaaggcaacaggacatccggtccttgtctatatggctgctggaagacttgcttgtgatcttgagaaattatcagacgaatctgctgctgagtttgcaatgctgcagctgaagaagatgttccccgatgctactaagcctgttcagtatctggtatctcgctggg

SEQ ID NO: 686 - DNA, 232 bp, Nicotiana tabacum
ttcaaggcggccaccgcggctcttccgccacgatgacttagccaacgacacgtgcccttgggggccaaaggcccctactgcgggtcggcaagcggacggcgggcgcatgcgtcgcttctagcccggattctgacttagaggcgttcagtcataatccagcgcacggtagcttcgcgccactggcttttcaaccaagcgcgatgaccaattgtgcgaatcaacggttcctctc

SEQ ID NO: 687 - DNA, 324 bp, Nicotiana tabacum
gatcgggaaagagctcaagctcggactggtaaaggcaagactaagggaaaagatgatggtttgactcctgagcagcgccgtgagagggatgcaaaagctctgcaagagaagactgcaaagaagacgccaaaagatgcaggaggtagcaatgctggaactaaagacaccaagaagtaatgagctgctgtttgctcaatgtggtttgttagctttctggagatttatagatttaattatttcttaatcccggcgtttcgtgtgttcaatgtatcatcagttctatgttgtgttgcagtatgacattgagctgaatcttagtatgtt

SEQ ID NO: 688 - DNA, 300 bp, Nicotiana tabacum
  misc_feature (298)..(300): n = a, t, c, or g
tggtgagacaattaatgacaaagataggtgcccacagtgtaagggagagaaggttgtgcaggagaagaaggtgttggaagttcacgtggagaagggtatgcagaatgggcagaagataacattcccaggcgaggcagatgaagcgccggaaactattactggagacatagtctttatcttgcaacagaaggaacatcctaagttcaagcgaaagggagatgatctttttgttgagcacacattgaccttgaccgaggccctatgtggtttccagttcatcttgactcacctagacaannn

SEQ ID NO: 689 - DNA, 432 bp, Nicotiana tabacum
tgcatggttctatttgctgggattgccgctgaagctcttatttatggagaggctgaaggtggagaaaatgatgaaaatctcttccgaagcatctgtattcttctagaacccccactctctgtggcacagatgtcaaatcaagcaaggtggtcggttctgcaatcttataatctgctgaaatggcacacacatgcacatcgagctgcggtaaaagctattgaaagtggatgcagtctgagtgtggtcattaaaaaaattgaggaagtcatgtctatgaaaaaatgaagctggaagagaagaatgatagatagatatttgtagaagagggtttgttgaggtgttttaacttgtccaggcatatttactgctatgaaaagcctcaactggagctagtagaaaaggatcgaacattctttgggcccgtggagatgt

SEQ ID NO: 690 - DNA, 249 bp, Nicotiana tabacum
aggcggcattggtggcttatgtcgccggaggtggtggtggatatgagcggattgtggcggcggctttggtggagaaggaaggtgcaaaggtaaggcaagaggatacggcaaagctatttttcaagatggtttctcctaaatgtgacttgagggtgttccattgctcatttgctaagaatggatgtataaaggattgaaatttatgtgagtttaaccaatatttgttcattagtagtctgcattggcttt

SEQ ID NO: 691 - DNA, 162 bp, Nicotiana tabacum
acaggaaagaaagagcaggagttggttctgatgaatcgacaagtgagacctattaaagtccacttgcccattaataaaccaaccccacatagcttatgtttggttatgtgaggcatgtattaaaatttctcacgggtagtcaacttgggtccatctaatggt

SEQ ID NO: 692 - DNA, 361 bp, Nicotiana tabacum
cttgatgctacacgtggcgttgggtggggcaaggaccttcgtcccccctttatgcacggcccaaaggttgtcgaagctgtcgagtccgagtgagacccttttcttaggtttgtctttccagttaaaagtataacttcagagcttgttgggctaccaacagtgcatcactggtgaatttgagtgtatcactgtttctgtcattcgctgctctaagacctgttttatagtttcctgtcttgtgaaagatgccaatggtttgcattggctttaacttcagccttttgctcttttgggggaacatttaattcatactggaaataaagaagaaatgttcatgctctttccttgttggtctcggctt

SEQ ID NO: 693 - DNA, 337 bp, Nicotiana tabacum
ctccttcactgggaaagttgaaaaatcttgttttcctgcgtctgaatgataaccagctaactggaccaatcccaagagaacattctagtgtttctagcctgaaagttgtggatgtctcaaataacaatttgtgtggaacaattcctacttctggtccatttgagcatattccactgaacaactttgagcacaatcctcgacttgaaggtccggagttgttgggactcgctagctatgacaccaattgctcttaggaaagttgatgaataggctgagaagaacagccgctttttgtggaagttcacataaatcccttccctgaatgttgtttatgatt

SEQ ID NO: 694 - DNA, 462 bp, Nicotiana tabacum
cttctttggatccatttttgtggattaatttgttgattcaaagttttcctatttataactgggttttcgtttaattattttcctaattaatcatcgagcctctaattaatggagcctcgtgttggtaataagtttcgtttgggccggaaaatcggtagcggctcctttggtgagatctacctcgggactaatgttcagactaatgaagaggttggagttaagctggaaaatgtgaagacaaagcatcctcaactattatatgaatcaaagttgtataaaatactacaaggaggaactggaattcccaatttgaaatggtttggagtcgaaggagattataatgtccttgtgatggatttactgggacctagtcttgaagatctcttcaatttctgcagtaggaagctgtccttaaagactgttcttatgcttgctgaccagatgataaatcgagttgaattt

SEQ ID NO: 695 - DNA, 254 bp, Nicotiana tabacum
aaagcaaagcaatgaaagattgcttttttacatagataataaaatgctgaaattcctgaaaccataatactagcaaattctaacagtaaaaatatttgcacatggactaatcaggaaccagtctcaatgcgcatttgttttataacggtggcgttaaggccagcttgcgcatgcttcaactattctgccgaaatctgctacctccaatcagcacagtctcaacgtgcacttgaaccaatgcctatacacttgtt

SEQ ID NO: 696 - DNA, 358 bp, Nicotiana tabacum
aagtcccccaagtgttattaaagcttactacaaacagtatgaaaaagatttttcaaattttctaaagtatcgttcagaagaattgatgaaaggtgggaagatggttttaacatttttaggaagagaaagtgaggatcctactagcaaagaatgctgctatatttgggagcttttagccatggccctcaatgagttggttgtagagggactgatagaagaagagaaagtggactcattcaacattcctcaatatacaccatcaccagcagatgtgaaatacgtagttgagaaggagggatcattcacaattaatcaattggaagctactaggagtccattggaatgctcgtaatgacaa

SEQ ID NO: 697 - DNA, 361 bp, Nicotiana tabacum
tgctcaacttgggatggtaacaagcctttggcatggaggaggaagtatggttggactgcattttgtggccctgttggacctcgtggccgagactcttgtggcaaatgcttaagggtgacaaatacaggcacaggagctcagaccacagtgagaatcgtggatcaatgcagcaatggcggactagacttggacgttaacgttttccggcagctcgacacagacggaagagggaatcaacgtggccaccttattgtgaacaacgagtttgttaattgtggtgacaaaatgaatgttctggtatccccagttgacaaggaataagaagcaaaatatggccatgtttagtctttgacggcccaaa

SEQ ID NO: 698 - DNA, 304 bp, Nicotiana tabacum
cggcctgctgcaagtcctacattcgttccatcaatgcattccaattctcacaagaaggtgcttgaaatgagaaccaaggacattcccgagaacaacgccacagccaggactcaaatcccagcaacaatcaccgaacatgagttcagcaaatcctcagtggaggggtagatgtaaagggaagggaaaaaagaagcggagaatagctttacctagtcaatagtttttttgtgtcatctctgcatttctcatttcagttaatgttatttacttgctgttttttcattgctttgttcattggttcttt

SEQ ID NO: 699 - DNA, 610 bp, Nicotiana tabacum
attgctcgttttggacacggatcagccaaactagcccgtcaagcacaaagcaaagagaaaacactggctaagatggagcgtggagggcttacagagaaggtggtgaaggacaaggtcctggtcttccggtttcctgatgttggcaaacttccacctcctgttctgcagtttgtggaagtgacatttggctacacacctgataatctcatttacaagagccttgattttggtgtagaccttgattcaagggtagcactggtgggacctaacggagctggaaagagcacgctgcttaagctgatgacaggggatttagttccccttgatggcatggttaggcggcataatcacctgcggattgcacagttccaccagcatttggctgagaagcttgacatggaaatgtctgctctccaatatatgataaaagggtatcctggaaatgaggaggagaagatgagagcagcaattgggaggtttggtcttactggtaaagctcaagttatgcctatgaagaacttgtcagatggtcaacgaagcagggtagtattcgggtggttagcttttaggcaacctcacatgctgctgttggatgagccgaccaaccatc

SEQ ID NO: 700 - DNA, 414 bp, Nicotiana tabacum
tcagaatactggtgatattgaggaccaggtgatagcagtgaacacggtgcaacatgaaaactccggaaagttttacataacaaaattcctgggatctcctgaaggagcagagaatgaaattagtttctttaacaaactagaccatgagttcaacaaggttaataccttctataaggacaaggtggatgaagtcatgagggaagtaactttgctgaataagcagatggatgcgttgattgctttacgtatcaaggtgatggatcctggtttcgatgcttttggctcccttcaacgtctttcatttgacattaacaattcaacgccctcgaggagttacatctcctctcagaatgacaactgtagatacagatcatatgactgtcggcacgtgtttcgacccaagttacagcagac

SEQ ID NO: 701 - DNA, 264 bp, Nicotiana tabacum
gcaactgtaaaacaagtgtataggcattggttcaagtgcacgttgagactgtgctgatcggaggtagcagatttcggcagaatagttgaagcatgcgcaagctggccttaacgccaccgttataaaacaaatgcgcattgagactggttcctgattagtccatgtgcaaatatttttactgttagaatttgctagtattatggtttcaggaatttcagcattttattatctatgtaaaaaagcaatctttcattgctttgcttt

SEQ ID NO: 702 - DNA, 286 bp, Nicotiana tabacum
agattaggagcaaacaaatattcagagaggcaggcaattgggacggcagcgcagagtgacaaggattataaggagccaccaccagcgccactgtttgaggcaggagaattgacgtcttggtcattctatcgtgctggaattgctgagtttatggccactttcctcttcctttacatcactatcttaacagtgatgggtgtttcaaagtctgaatccaaatgctccactgttggtattcaaggcattgcttgggcttttgggggcatgatttttgcccttgtttact

SEQ ID NO: 703 - DNA, 386 bp, Nicotiana tabacum
aaaaaaatgttaaagatttctggccagatgttaagattaagtatattgctgttgggaatgaaatcagccctgtcacaggcacatcttaccttacctcatttcttactcctgccatggtaaatatttacaaagcaattggtgaagctggtttaggaaacaacatcaaggtctcaacttctgtagacatgaccttgattggaaactcttatccaccatcacagggttcgtttaggaacgatgctaggtggtttactgatccaattgttgggttcttaaggggcacacgtgcacctttactcgttaacatttacccctatttcagctattctggtaatccagggcagatttctctcccctattctctttttacagcaccaaatgtggta

SEQ ID NO: 704 - DNA, 256 bp, Nicotiana tabacum
agaggagatagtgctttttgcagcctagactgtagagaaaagcagatgaaacaagacgaaagaaaagagaaattgccgaaggttgcaacaaggaaaaaagttactaactcagccgccatagccaccgtgggaagtggaacaggatccgacgctccacctcaggccagaccgtaagccggccgccgtatagattcttactagctataatcacgttgttgaaattcgataatgaacaaatattccagctgatgtttaa

SEQ ID NO: 705 - DNA, 283 bp, Nicotiana tabacum
ggttgcaatgtttgtaacaagaaggtgtctaaggaaggttggttatattatagcaaggatactggctatattgcacatattaagtgtgctaaaggtgctaaagttggggtttcttggattaaagagagacttaatatgcttaaagttaagtagaagaaattaagtatgtgagatgatatatatatctgcttgatcaagtgcttgaaaatatataatgtagggattatgcatgtcgttaaaataaggtatcttgcactggcagatatgaaataagtccaggatt

SEQ ID NO: 706 - DNA, 201 bp, Nicotiana tabacum
aatgatggttataagattgatctggcgtttgatgatgctgatactatggaagaagaaacacttgcagcaatcattgggcgtcggaaactgcagggtgatgattctataattcaagagaagattattctggaagctgctgataaactgatacttattataaaggaaaaacaattcaaaagcagtgtagatggttcaattcca

SEQ ID NO: 707 - DNA, 331 bp, Nicotiana tabacum
ggtccgatgctcttagatatgatcaaagacgtggagatggcaatctcttgtcgaaagggacgaacaggcactgctgcaggggatgttgcttttcctaaagggaaagaaaacttggcatctgtcctcaaacgctataaacgtcgactatctaataagccagtaggaaaccaggaggccggtggagctggaccgcgcaaagtaatgtcaccttcagcagcccctttcagcttgtaacacttgtttcttggttcatagcagctgaccggtgattaccacttttagacttgtgcttagttgctatgaatttgctcctctctctctctctctctct

SEQ ID NO: 708 - DNA, 278 bp, Nicotiana tabacum
aatcctggacttatttcatatctgccagtgcaagataccttattttaacgacatgcataatccctacattatatattttcaagcacttgatcaagcagatatatatatcatctcacatacttaatttcttctacttaactttaagcatattaagtctctctttaatccaagaaaccccaactttggcacctttagcacacttaatatgtgcaatatagccagtatccttgctataatataaccaaccttccttagacaccttcttgttacaaacattg

SEQ ID NO: 709 - DNA, 328 bp, Nicotiana tabacum
tctagtcaatcaggagagctaggttcatctactcaagcagttgatggaataattggttttggacaagcaaactcatcccttatttcgcagctagctgtatccggaaaggtgaaaaaagtatttgcacattgcctggacggcagtaatggtggtggcatatttgccattggacaagtagttcagccgaaagtaaagtcaacaccactagtcccaaatgagccacattacaatgttgtcatgaagggaattgaggttaatggtaaagctcttgacatccctacgactatctttgacgcgggatccaatagaggaacaataattgacagtg

SEQ ID NO: 710 - DNA, 208 bp, Nicotiana tabacum
cgattgctccctataacggccctggactcaccgaagaccaacaaaatggcggcgtttggctcgactttaaaattgacggccgtgtgaaatggaaagtagggtctgttacaaccggtcattaccatcttcacgtcacgtgctccgcgtatgttccactcggtgaccaccctgctaacggcggaatcgtcgtcggaaacaacgccgttaa

SEQ ID NO: 711 - DNA, 587 bp, Nicotiana tabacum
ttgttttgagtgcctatttattttctatcgggatctatggattgatcacaagtcgaaatatggttagagcccttatgtgtcttgaacttatattgaatgcggttaatataaattttgtaacattttctgattttttcgataatcgtcaattaaaaggagacattttctcaatttttgttatagctattgcagccgctgaagcagccattggactggctattgtttcatcaatttaccgtaacagaaaatcaactcgtatcaaccaatcaaatttgttgaataattagtattaatcatctagattctaatattgataaatcgattttaattagcatgtttgctacgtaaggtgtgatcttgtttgcaaaacataagaaatcaaagtattttggccctctctcatatctcataaaccaatccagaagggggttgattagaaaattatgataactcattgatccatctggtatataaatatatgattatatgattcgtttctaagtttactagatcgaaaattcctaacattcaaaaacgtatagacccaatgtcacattcagtaaagatttatgatacgtgtataagat

SEQ ID NO: 712 - DNA, 341 bp, Nicotiana tabacum
caaagagtgtggtaattttgcctatgggatatgcccgcgttcacaaggaactccagacgatcccatatgcaccacttgttgcgcaggctacaagggctgcaactattatagcgctaacggaacttttatttgtgaaggatcgtctgaccccaaaaatccaaacgtttgtccccagttttgtgatccagatattgcctattcaaaatgcccgcgttcagaaggagagacgataattaatcccaccggatgcactacctgttgcacgggatacaaaggttgctactacttcggtcaggatggcgagtttgtttgtgaaggagagagtgatgaacccaagagtt

SEQ ID NO: 713 - DNA, 227 bp, Nicotiana tabacum
cttggctcatcgatacattatacaactacattgcatacaaggagccactacgaatagacaatgcagaaggactaagtttctctttgcttgttttctcctccacttccgtagcatgtattggtgttttggtgtttaggcggcttactcttggtgctgagcttggcgggccgaaagtttcggcatgggtaacttgcatattcttcatgtttttgtggctcatatttgtt

SEQ ID NO: 714 - DNA, 356 bp, Nicotiana tabacum
aaccacagcttccctagtggttatcaccatgcgtctcgtgcccctgaaactcacaagaaagtccactttgtggagtgtgacaaagccactgaagttgataggaatggaaaatatgaagtcacagaggaaaaggttgataatgaagctgatagcttcattcagaggaaacacaagacctttgagcttgcaaagatggatacttttaaggtctattgatagactatttgcatggcagacaatacatttccctctgactgttaggtcattggttgaatcactagtataataaaaaaaattgtctgtcgtatacacttgaccgtagactgtctttacagttgtatgcgagtagttgatat

SEQ ID NO: 715 - DNA, 576 bp, Nicotiana tabacum
caatgctactagtgttgatgttgaagaacacctttataggcttgctacagatgctggcattactgttgttacatcctcacagcgccctgctttaattccattccattctgtggaattacggttgattgatggtgaaggcaagtgggagctccgttcaattaagaccgatgagcgggaaggcgaaccaaaatgacattccttttagccggtagttggcaaaggtctattaaattacacaacaattgtgactatgattatgtattccaatgttgtgaaaacgttcttggacgggtatagaggcagtaatgaattgattatgcatgtgttacattgcagttagattgaagctaggaaactatacagttagggtatacaaatattaaattgtttcttgtaatatttcatatagcaaaacgagtttctgtataggcagttgttctgattaagcctttgtcccgtcgttgtaaaaggtttatacctgatcagccccccccatgaataaaaatggcaggtagaattgaggctgatggtttttattctacatttaacattatatataatattaatcagcagcca

SEQ ID NO: 716 - DNA, 393 bp, Nicotiana tabacum
attacctacgatagaaaataactatcactaagcataaagcttagtgacgtataaactttgggcttggagtccttaaattctccaattccccttttctgtcatagttagctcaatttaacataatttaaaataagttaacaaatatatcaaacatatcaaatattaaactttaaagcgtttccaaatattaataagaatattcaagagtctagaaagcatatactatcaatccaagagagtttaccaaatattcatttttcgcccaatatgtatgtcatgccatcacactaagcataatcaaatatcaagatggaccgaagccccaaatcaagtagggtcaaaactcaatagtcaagagaatcaagaaccatattaaaaatggcttcccagttc

SEQ ID NO: 717 - DNA, 487 bp, Nicotiana tabacum
ggaattagattggttgggacgacaccgaattgcagtagggatagctgctggacttgagtatctccatataaaccacagtcaatgcataattcacagagatctaaagccagcaaatgtccttcttgacggtgatatggaagctcgaattgctgattttggacttgcaaaagcacttccagatgcccatacacatattacgacttcaaatgttgcaggaactgtgggatatatagcaccagaataccatcagacactgaagtttacagataagtgtgatatatacagctttggtgtggtgttggcagtgctggttataggaaagcttccatcagatgaatttttccagcacacgcctgagatgagtttagtgaagtggctgagaaatgtaatgacttctgaggatccaaaaagggcaattgatccaaagctgataggaactggatttgaggagcaaatgcttttggttctcaagatagcttgcttttgt

SEQ ID NO: 718 - DNA, 236 bp, Nicotiana tabacum
ggctattacctcatctggtctgaagaaaggtgaattattcttagccgatgttaacactcagctgaagaacaaaaatgttaccactgatgtaaaagtggacaccaattccaatgtctacactaccatcactgttgatgaacctgcaccgggactcaagacaatcgtcagcttcgtattaccagatcagagatctggaaaggtagagctccaatatttgcatgagtatgctgggatca

SEQ ID NO: 719 - DNA, 416 bp, Nicotiana tabacum
ctctagctctaaatgcaagaatggcaatagcagcaatatttccagcaagtcagaagagttcaaaaactgcatctttgacattctcagagatatatggaggagtgatcatgaacaatatcatgggcatgacaacacttttggcagctgtgtttataaaggacctaagatgggattattcagcagaagtgctaatagttttggtggtttgctctgtagttggacttcttgcatttttcaccactacatatccactttggacttgcctcttagcattttctctataccctttctctgtgttgctcttttaccttcttgaatgtgtatttggttgggcctaagtggtaatcataataccaccaatacaaccctagtccataccaatcctctcagctcgaaaggaaaaataaataagaggg

SEQ ID NO: 720 - DNA, 234 bp, Nicotiana tabacum
cttttaaccatcgctatgtcaaatctaaccctcgagaagttgaaaatgcgacgtggatgttaacagttttcaattgttttggtcagtgcttctgtctccattttgaagcctttcagctcggaacagctcctgtttacatggcatttcttcgttttatgggagatgagatagaggctcgaaactatagctacagcttggaagttgggggtaatggaagaaaacttacatgggaag

SEQ ID NO: 721 - DNA, 290 bp, Nicotiana tabacum
ggcggcgatggcgacggtgacggcggcggggaaagtgaacggagtttcaaaggagatgcattacagaggtgtacggaaaaggccgtgggggagatatgcggcggaaattagagatccagggaaaaagagccgtgtttggcttggcacttttgatacggcggaggacgcggccagagcttacgatacggcggcgagggaattccgcggagctaaagcaaagacgaattttccgattatagagccggagaatgtgaaattggctaatagaaattgtagtccgagccaaagca

SEQ ID NO: 722 - DNA, 371 bp, Nicotiana tabacum
tggaaatcagaatcaaacgagcttttacccttctgttccacacgagatttctgttctcgttgagctcatcttaggacacctgcgttatcttttaacagatgtgccgccccagccaaactccccacctgacaatgtcttccgcccggatcggcctgcaagcaagccttgggtccaaaaagaggggcagtgccccgcttccgattcacggaataagtaaaataacgttaaaagtagtgatatttcactttcgcctttcggctcccacttatactacacctctcaagtcatttcacaaagtcggactagagtcaagctcaacagggtcttctttccccgctgattccgccaagcccgttcccttggctgtggta

SEQ ID NO: 723 - DNA, 402 bp, Nicotiana tabacum
tgcagcttatggaatgcagatgagtgggctacacaaggaggtagagtcaagacagattggacacatgctcctttcactgcatattacagaaatttcaatattgatggctgcgcagtcacatccggcgcctcttcgtgtaagtccactgattcagcaaacaatgctaggccatggcaaaatcaagaacttgatgctaagggcaggaataggctacgatgggtgcagagcagacacatggtttacaactattgtgctgattctaagaggtttcctcaaggcttttctcatgagtgcaagcgttcgaggttcctctaattaagttgctggagcaaggaaattgtggcactgcctctgctatttattaagattgattcttctcatatttgtgaataatgaatatat

SEQ ID NO: 724 - DNA, 367 bp, Nicotiana tabacum
cgtgggagagacaaggattaccgtcgtcggagcagaagccgcagcccagattaccgcagagatcgcgagagaggtaaatatgatgaggagaggcgcagccgaagccggtctcatagaagtgtgtcccctgctcgccgtagcctcagtcctcggaggagcccttctccacgtagaacaaccccttctagggatgctagtccagatggacgtaatcacaaagaccggtctccaactccaaaaagtgtctcaccgcggggtagacgtggtggttctcgcagccccttgccgcattctgatgctgatgattaaggagcaaaggagaaggccacgaatgtaatctggtttaggtcgctgttgcgtatcaaga

SEQ ID NO: 725 - DNA, 324 bp, Nicotiana tabacum
tacggcaaactagaagagaaaggcatcggaaaattcgtcggaaaagcagagacttatctccacaaatatgaaacttctcattccaccaccacaaccaccaccactaccggaacaaccaccacctccacgactgaacacacgcagtcctcggcgcatacagagggaaaacatgaacaatccggaagtggatatggcgagtatattaaaatggctgaaggaattttcaagaaacattccgatggcacccactcatcggaatccggcggaggtaaaaaaggagagtatcttaaaatggctggagatttcttgaagaagcattgactt

SEQ ID NO: 726 - DNA, 459 bp, Nicotiana tabacum
  misc_feature (106)..(106): n = a, t, c, or g
ttctcactgtatatgaatgctttggagtattttaaaacacatttgaagtatgagaagaatcccaagattaaggaagcgattacgcagaagtttgtggagtatttgnggagggctgaggagattcgtgctgttctagacgagggaggaggtgggccaccagcatccaatggagatgctgctgttgcgtctcgtgcaaagtcaaagccaaagaatggaggagcagagggtgatgatgcagagaatgtaaagttaagagctggacttaattccgctattataagggaaaagcctaacgtgaagtggaacgacgtagcagggcttgagagtgccaagcaggcattacaggaggctgttatactgccggttaagtttcctcagtttttcactggcaagcgtcgaccgtggagagcctttttgttatatggcccgcttggaacaggaaagtcatacctagcaaaa

SEQ ID NO: 727 - DNA, 276 bp, Nicotiana tabacum
tactcctgaaaatatgttttatatggatgaggaggcgctattcttcatgcctggattactagtgaatatggcagaaggactaatgttacctccacctcagtgttcacaaattggagatcatatggaagctgatgttgacatgcctttgtggagttattctatctaagtataactctggttatcacttagtattgggtgatattccctataagtacagttacttcaattaagatttcggaggttttggtaaatttcgtactcatgaatatttggagg

SEQ ID NO: 728 - DNA, 461 bp, Nicotiana tabacum
tactactgctactactacttcagctgatgatcatagcgctggatcaaagaaaagatcaaaagctgaaaacaatgaaatattgaaatcagttcaaggagagagtagctcaagtgatgaagacaactcttgtacaaagaaaccaagagaagagcacattaaaactaagacaactagagtttatgtgagaactgaagcatctgatacttctcttattgtgaaggatggatatcaatggaggaaatatggtcagaaagtaacaagagacaacccatctccaagagcttatttcaagtgttcttttgctcctacctgcctcgtcaaaaagaaggtgcaacgaagcgtagaagatcagtctattctggtggcaacatatgaaggagaacacaaccattcacatccctctaaaacggatgctgcaaacgccgttacaacttccccttgtaaccgtttaaacgggaaga

SEQ ID NO: 729 - DNA, 353 bp, Nicotiana tabacum
cttggatattgtttgtggacgtttatcagaaagcagttcaagtgatgaagagtcttgttgcaagaaacctagagaagagcacataaaaactaaggtttctgtcgtttctatgaggacagaagcatctgatacctctcttattgtaaaggatggttatcaatggaggaaatatggtcagaaagtaactagagacaatccttctccaagagcttacttcaggtgctcttttgctcctggctgccccgtcaagaaaaaggtgcaaagaagcatagaagatcagtcagttgtggtggcaacatatgaaggagagcataaccatccagtaaacccttcaaaaccagaggctgctgctg

SEQ ID NO: 730 - DNA, 455 bp, Nicotiana tabacum
gaaagtcaagacgtcccctccttcctcttctcgccgctactttccatcgatcaaattttgacttagtaaaagcgatcgaagaagaagatgtttggaaggacaccgaagaagagcgataacacaaagtattatgaaatcttaggagttccgaagagtgcttctcaggatgatctcaaaaaggcttatcgtaaagccgctattaaaaaccatcccgataagggaggcgatcctgaaaagtttaaagagcttgcccaagcttatgaggttttaagtgacccggagaagcgtgagatatatgatcagtatggtgaggacgctctcaaggaaggaatgggtggtggaggtggtggacacgacccatttgacatattccaatcattctttggtggtggaagcccctttggtggtggtggaagcagcagaggtagaagacaaagaaaaggagaggatgttgt

SEQ ID NO: 731 - DNA, 480 bp, Nicotiana tabacum
ggctgctgacttgattcatttatatgcttacacaaagtgttttttagaatacgagaatacaagactgtaacttcacctcctgtatatataagtcctttagacctgggacccaaatatgctgataagctgggccctggtgttcacgagtatcgcaagacatatggcgaaaattattgcttaggacagctgatttattggtataatcaagcaaatgcagatccagataattgccttttcagggcgagcaggggttgcttgtctttacctgaagctggctctttttatgctaaagtccagaagccgtcccgccaacgtgtttacggcccaaggactgtgaagttcatgctatctagaatggagaggcagccccagagaccatggccaaaagaccggatatggtcatataagagtggtcccaaagtatttggcagtcctatgctggatgctattttaaacaaggctccactagaaagggaaatg

SEQ ID NO: 732 - DNA, 201 bp, Nicotiana tabacum
cgttgagaactcgccaccggttatgccggagaactcgccgccggcagtgatgctggacacttcaccattggatctcagcctcggtggatcccgtagtttatttagcaacggtgtgggtagggttttgctccagaaccatcagtttcacggttctccagtcgccggaggaatcgctggatgtattacgccggtgaatcatat

SEQ ID NO: 733 - DNA, 254 bp, Nicotiana tabacum
tgactctcttctctcatcttcgtcaatctctcgtctccttctttcgttctttgggttttacgactgaaaaatggaattctctgaaacaggctatgacattgccactgatgaatgggacaataatattcctgataactgggatgataatattcctgataaatgggacgataatattcttgataccttcaaggtattttcctcagcaactaaacctcagaaaggtggacttcgcttgtttgcagattatgacttta

SEQ ID NO: 734 - DNA, 444 bp, Nicotiana tabacum
tctcaaacccgtagccattgagcttagcctccctcaaacaggtccaagttcacggtcaaaacgtgttgtcacaccacctgttgatgccactggtaattggatgtggcaactggccaaagcacatgtctgttctaatgacgctggcgtacaccaactcgtcaaccactggttgcgtacacatgcgtgcttggaaccatttatattggcggcacataggcaattaagtgcgatgcatcccatttataagcttctggatccgcatatgagatacacactagaaattaatgcattggctcgccagagcttgatcagtgctgatggtgtaatcgaggcttgttttactcctggtcgttattgcatggagatgagtgctgctgcctacaagaattttggcgttttgatttggaaggcctcccagctgaccttatcagaagagggatggca

SEQ ID NO: 735 - DNA, 444 bp, Nicotiana tabacum
  misc_feature (5)..(5): n = a, t, c, or g
  misc_feature (426)..(427): n = a, t, c, or g
  misc_feature (437)..(437): n = a, t, c, or g
  misc_feature (439)..(440): n = a, t, c, or g
  misc_feature (442)..(444): n = a, t, c, or g
tcctntcttctcgctcccttctttcgttgtctgaatcactgcttttccttctatcttcctccagctcagcaagctcagccaagctaccattcaacaacagctcgagcgatttccttttcgaattcctcaaccacttagggtaagaagcaatcacttcacatggcctgttttcacttgaatcacaagcattaacatccgccgaagcaatcaaatcaagaatcttaacgaccatcaaatcgacgaattcagaatccaccagctgcagcagcagtgaagagcagtttgcaccaatcagaatccaacaagcccatgttacaatcaactttcccagttccaaataaataaccatcaaaaccatcagatccctgcccgggcggccgcatcagaaatcaaattcccgcggccgcacatggcggccgaggagcnnagcgacgtcngnnannn

SEQ ID NO: 736 - DNA, 298 bp, Nicotiana tabacum
catactccaatagtgaacttgatgtcaaagcagcgcaaagatacattgacttcatgtacggatggttcatggatccataggtgtatggaaataatccttcaattatgcgtacaatgcgtgggatgaaaggctaccgaatttgacagcggagcaagctaagatgatgaaagggtccttggacttcataggactaaattactacacctcaaattatgcagctcatctccctgccgcaaacaattttaatgtcagcagtgcaacagaccctcatgtacacgttacaggtgaaagagatgga

SEQ ID NO: 737 - DNA, 366 bp, Nicotiana tabacum
cttatcaccggcagtggaaatcgacggtggccggcgatggcattggcaccggggctatcacggaagctgaagaaagtgctggaaactcgaacagacacgccggatctgctcgcatctctgaatactctctccacattctacaccgaaaacacacctcattctcgccgtaacctccgatccactattgagaagcgttctctatctataaatgaagagttccttctttcctccactgctgctcagaaggcgttggatcgagtcgaagaagaagtcaattcgatcgtggaatgctgtgacaaaattgcactggctttaagcagttgcaatgccacgacaggtgatattattagtacctgcccgggcgga

SEQ ID NO: 738 - DNA, 305 bp, Nicotiana tabacum
catatatagcaatacaagaaagatgcaaggccagtggatagccgcaagagacctttcaattacatgggtggacaatcctcagtactggacatggaaaactgttgatcctaatattgaagtggcggagcttcgtagggtagcttggcttgacatttatggaaagatcgagacaaaaaatcttattcgaaagactagttatgctgtatatttagtgttcaagttaacagataaccctcgtgaacttgaacgagccacagcatcgctacgatttgtgaacgaagtggcggagggcgctggcattgagg

SEQ ID NO: 739 - DNA, 422 bp, Nicotiana tabacum
tgcaatagatgatgatagaccttcatctaacaaagacatggagaaaactttatcacaaacttgtgatgcagatgtagctaaggacgatggcccggtcagtgatgtgtcgaaaacaactggtgatcaagaaaattttaggcctaccggtgaagaccagacagaggcaccagttgttgacttgaccaagcgtttatcttgcaaatggacaagtggagttggtccccgcattggctgtgttagagactatcccattgatcttcaatctcaggcccttgaaaaagttaatctttctccgagggttacattgtctcagcccaagaattgttatccaatcccttcaccacgaccgagcccaaaaattcgtgtctcgcctaggctcgcattcatgggacttccaagcccaagagtttctgttactagca

SEQ ID NO: 740 - DNA, 541 bp, Nicotiana tabacum
catctttcgattctgtgctattccacaggtcatggcaattgggacattagctatgtgctacgacaacattgaagtcttcagaggagtggtaaaaatgagacgtggtctgactgctaaggtcattgaccggaccaggactatggcagatgtatatggtgctttttttgacttttcttgtatgctgaaatccgaggttaataataatgatccaaatgcaacaaaaactctgaagaggcttgacgtgatcctgaaaacttgcagagattcgggaaccttgaacaaaaggaaatcatacataatcaggagcgagcctaattacagtccagttctgattgtcgtcattttcatcatactggctattattcttgcacagctatctggaaaccgatcttagacgatattttgggttacaaaaaagaagtctggtcaaggaagacagcacaagctcttggccaattatgtgattagtgcagattttgatgtttgtaattctatgttcattaagtgatagttgcaccttttaacctgacaaggtaattac

SEQ ID NO: 741 - DNA, 540 bp, Nicotiana tabacum
gaaaacaacaatggctaccaatgctaccaagccttccgtttaccttcaagacatggaggaagtcaaaaaagtattcgcgcgcttcgacgccaacggcgacggcatgatttccggcgacgagctttccggcgtattgaaagccttaggatccgacacttcgccggacgaagttgaacgtatgatggctgaaattgataccgacagagacggctgcattaacctacaggaatttgctgatttttgcaaaagtgacggttccgttgacggcggtgctaaggaactcaaggaagcgtttgatctttacgatcaggaccataacggcttgatttctgctgcggagcttcaccagatcctcaaccgtttgggccagaattgtaccgttcaggattgtactagaatgatcacctccgttgatgctgacggtgacggtaacgttagctttgaggagtttaagcagatgatgtgtaataattgtaaaagataagcgatgcctttttttctcatcctttttccgttatttgagtggctgataacggtgag

SEQ ID NO: 742 - DNA, 296 bp, Nicotiana tabacum
attgcatccaggtccagttagtttattgcattggagtggtaaaggtaaaccttgggttaggcttgatcaagaaaatccttgtcctgttgattttttatgggcaccttatgatttgtatagaccgagccttcatgattcttttgaccaacactagcggagattgtgatgtgacagtgtaaaaattcttttacgcttttagcgtatacgagttatttttttctttttttgtattgtgataattctttgattctttttcctcattgggaagaagtgagacccggagtctgtagtattag

SEQ ID NO: 743 - DNA, 332 bp, Nicotiana tabacum
ctctttattatggtggtgtaggaggagatcacgagtataagggtgtgccgggaacttatttcccgctcagaagaggcggaaaagtaacactttatcaagatgctcatgtacccgaaggcagccttccgaatttgtggcttgaaaatggagtgcagtataagcatggacagtgttggcaggatatgttcaatgcaataaatcaggctcgtcggttgatttacattacaggatggtcagtgtaccacctagttacacttgttagggataatggaaaagctgaggaaagcatgttgggggaaattctcaagaggaaatcccaagaaggtgtgaga

SEQ ID NO: 744 - DNA, 625 bp, Nicotiana tabacum
  misc_feature (53)..(53): n = a, t, c, or g
  misc_feature (69)..(69): n = a, t, c, or g
tgcagaacttcatcactgcaatggactcattgaagttgaacatggttgccatngatcaggtccatcccntgttgtcagagctgtcatcttccctcaataagctatcgattctgccggtggattttgagggaaagacaaagatgagggagtggctttcaaggttgtcgaagatgggggctgcagatgagttgacagaacagcaggctcggcaactccattttgatctggaatcctcatacaattctttcatggcagcattgcccactgctggaacttaattgactatttcaacaggtggtatgtttgtatataagattgttgttgcatttagcaagctcttaacacacatgattctatctttgattggagtgctggtcactatctgagtagaatagccatctatattttgggacttcatacttgttagataattgtaagactggtggtggtacctataagatggaagttgaatcaaaagctgaaacgaaatcagaaatcagagcagcggccaccacgctcccagtcgccatagcgggtgggctcaggacctttagggcctccaatctcaccagtctttttattaatgttatcactgcccccttcgtcattctcgccctcaacttca

SEQ ID NO: 745 - DNA, 365 bp, Nicotiana tabacum
acaattttttgccttccacttacctaacattttttaaactatttgtgtcaaacagtgacagttcaaagtccaaaagattgactaatcttaaagttaaaacaatagttctacagctgaggttgatcatgacaccagtaactaattgagaattttgattaagtccccattttcccctaacccccaacatctttaccaaattatattttagttcacatgatgaataaacttgaccacaacgattttctagttggtctaatacattcaagattcaaaaaagacaaacactttaacccacaaaaagaaacctcatcgctaaattcaaagatgcagaagtttagacttcagattcatatactcccaaaaag

SEQ ID NO: 746 - DNA, 594 bp, Nicotiana tabacum
cagcgtagcagataaagatactgcagcatggacagtcttcacggctattggcagtttggcgatgagctccgaggacaatcaaaagtttcagaggatcatcaatggtcaacggctgctatgaaattggctcagcagataaggtccaagggtgagcggaggaataacctagacctttcaaagggctcatctgaaattaggcccagggataatttagggtttcaggaagataacaagtgggaaagccttaacttctacatgttgaatttggataccaagatgaatgaaaatacgtcgaagagttccattacgaatggcatgtacaacatgaattcagcttatcttaaacccaacgtcaacaacttgggaaatgtgtctttaagcaagttcaacattgggaaccacacaaaggaaagcaacaacaacaataacaacagtgagagtgccaatgggaataatgccactgacaaaaggtttaagactttgcctgctgccgagacacttcccaggaatgaggttctggtggatatatatttgtttgcaacaatgacacgatgcaggaagcctaaaacgccagctgttcggtctacctccaag

SEQ ID NO: 747 - DNA, 400 bp, Nicotiana tabacum
gtggcggctagagcgcatgacgtggcggctattgcattaaggggccgttctgcttgcttgaacttcgcagactctgcttggaagttgcctgttcctgcttcctccgacgccaagaatattcagaaggcggctgccgaggccgccgaggctttccggtcatcggaggccgaaaacatgccggaatacacaggagaagattcaaaggaagtgaacactattcctgaaaatatgttttatatggatgaggaggcgctattctgcatgccgggattacttgcgaatatggcagaaggattaatgttacctccacctcagtgttcccaaattggagatgatcatatggaggctgatatgcctttgtggagttattcaatttaaatatagttctggttatcactta

SEQ ID NO: 748 - DNA, 371 bp, Nicotiana tabacum
tccgccggtgctccgtcttacggtagtgatccgcataaacccccaaaagagaacaaaccgcagtcttacggtggttacccggctccaccaccttcagctccttacggtgatccgaacaaacccccgaaagataataacccacacgcgtcttctccttacggtgggtaccacgcgccagctccttatggggctacgagcccgtttgcatcactagtgccctcggcttttccacctggcaccgatccgaacgtgatagcgtgtttccagctggcggaccaggatgggagtgggttaatcgatgataaggagctgcagaaggcgctttcttcttataatcagagcttcagcttgaggactgttcatctccttat

SEQ ID NO: 749 - DNA, 342 bp, Nicotiana tabacum
gagattgattgggtttccggtatggactgtcgccacgcctcccttggccgtcgaacgttggaagaaattcgtcaaaagagagcagcagagagattaagcaaaacctcttctggacccgatcttaccaatatccctaatgaggttgtggggattaaaagatctgagagtgcaactcgactatcagagaatgatatgagtggtttagtttctcaattgaaacaaattcaaagaaataatgcagaactggatgaagcaaatagagcactggccttaaagcttcagacaaaagaagccgagaacaacatgttgcaaaagcgtcttaatgatctggagcaaaatact

SEQ ID NO: 750 - DNA, 268 bp, Nicotiana tabacum
attttcaagaaacattccgatggcacccactcatcggaatccggcggaggtaaaaaaggagagtatcttaaaatggctggagatttcttgaagaagcattgacttgtactatgtgaattcctttttatcttgtgttttagaatttctttgctgcagttctactattgttatttatcagtggataggtgtgatttgtaatgtgcggcctaggctgcattgccgatgctgctagccaatgaaaataattttgttttaatacgaaaaaaaa

SEQ ID NO: 751 - DNA, 527 bp, Nicotiana tabacum
gctgatgttttcgctttaaaggaaattgggatcgccgattcagttgggatatacaagaaaggctcaaagcctttggttattacaggtaaagctgttaaacagccttttgaagataatacatttgatttcatattttccggtgccggaatgatagataagtcgacgaagccgggcgatttcgcggcggagatttgtcggactctgaaacccgaagggtttttcgtggtccatacaacaggttctaaagatacgtacagtttcaattcattccttcatttgtttaactgttgtacattgattaagcctaggaatattgatggttttgattcaaatactattcgtgagattgttatgaaaagggttgtttttggggatgtatatgttgaagaaaaagtgagcagtgattcgaagaacaaatgtaatgttccggattataaactgaagctgattaaaaaagctgagcctttgattaaagaggaacctaagaaaccatggattacactaaagaagaatgcacagaacataaa

SEQ ID NO: 752 - DNA, 268 bp, Nicotiana tabacum
gctgattgacatctctgaagatggttttgtgtctcttcttactgaaaatggaaacaccgaagacgacctcaggcttcccaccgatgaagccctgctgagccaggttaaaggtggatttgaggaaggaaaggatcttgtgttgtctgtgatgtctgcaatgggtgaagagcagattgccgctgttaaggacattggtaccaagaactagtcgcgcattctgcagcataaataatttgctttagccaagacattttatatcttaatcgtg

SEQ ID NO: 753 - DNA, 250 bp, Nicotiana tabacum
acgttccacacttcgcatctttagcttttggtcttcattcccatctcctggtctccagtgagatgagctctaattccaattggtcttgaattgatccatttttttttgttctagtgttcaatttcttaattcttttctagctctcttatttcattcaattgaaataccaaaattttcgatttcgattattgaaagatgggtgttaaaggatttgttgaaggaggtattgcttctattattgctgggtgta

SEQ ID NO: 754 - DNA, 275 bp, Nicotiana tabacum
aaaagggtgcctgtgatttcaaaaacaagaatttggctattcgggtggaacaatcaagcaaaaggccaaattatctatcaatcaccttcttgtatcaagggggtcaaactgaaatcgttggtattgatgtagctcaggttggatcatctaactggagtttcatgagccgaaatgagggagcagtttgggacacaagcagagtgcccaagggagcattgcaatttaggttggtggtgacagccgggtttgacggcaagtggtattgggctaaggca

SEQ ID NO: 755 - DNA, 224 bp, Nicotiana tabacum
aggatctttttcattgcatggtcccctgacacgtcgagggtgagaagcaagatgatctacgccagttcaaaggacagattcaagagagagcccgacggaattcaggtcgagttgcaagcaaccgacccaactgaaatgggacttgatgttattaagagccgcgccaactagatatcgatggataggtatcagatggaccttataagtgagaaaactcctaatgc

SEQ ID NO: 756 - DNA, 361 bp, Nicotiana tabacum
tgctcaccaacatacaggagggactgggtcagccctccatggagaggatggacgtgccatatgctcatctcttccaatctacggggaaggaaaggaaccaggagatgaagctggttacatcgttgggatgtcctcttgttatcctaaacctggctctatcaagatttcggaaggggaaactgtaactttaatatcaaattatagcagtgctcaaaggcatacaggagtgatggggctgttctatctcttagttactgaaccatcaccaacgcctaactctttcctgcattctacagatggaacaggtgagattgtaatattgcacaatgctgttggagtcttggcagtgtttggaattgca

SEQ ID NO: 757 - DNA, 419 bp, Nicotiana tabacum
atatgacaagatcacctcagtggccattccagctgctttggcagctactgctttgtttatgattgggagaggaatctacaatatgcctcatggcataggtaagaaggattaaatggtggtgtctgctcgaccatcgttcctatggcagctgaagtttgaagggggatattttagacctgtttgttcattttgtggacttacttattagtagctaatactggttagacgcagacaatagagcgtgccgatatatggcatttgccatcagtattcggcagctaaaacatttgctcatgtgtttgggtttatggatatttgtattagacggtgtcggtgtggaaatcaccatggcaactaatgcgtcttcctttatcgtattaactattaagtatgtcaaaataagaaatcccaagccataa

SEQ ID NO: 758 - DNA, 240 bp, Nicotiana tabacum
aatcttatgctgggcactatattcctgcttttgctgctagagtacacaagggaaacaaggctaaagaaggaatacatataaacttaaagggatttgccattgggaatgggcttacagatcccaaaatacaatacgctgcgtatactgactatgcattggacatgggattaatttcaaagtctgatcatgatcgtatcaacaaaatacttccagtttgtgaagttgcaataaacctttgtg

SEQ ID NO: 759 - DNA, 518 bp, Nicotiana tabacum
attttaggtgacattctttcctttttaatttgtcccaaaaaaaatgatggttgtatctacctctggtacagttgagtccatttaataaaggctctatatacctttgccagtaggtgcaggaacgctcacatatgtgtatatatgttgaatatatgagtatttactaagtggtgtatttgctagctttagatcttagattcgcctccgaagtctagccgataatggtgttttgtttgtttgtgtatgtaaagctcggtgttgaatacggagctgaatgagatggttgcagttaagaaaattgcgaatgcgtttgacaattacatggatgctaagaggactctccgtgagattaagcttcttcgccatttagaccatgaaaatgtaattggtttaagagacgtgattcctccacccttacgaagggagttttctgatgtttacattgctactgaactcatggacactgatcttcaccaaataattagatccaaccaaggtttatcagaggatcactgcca

SEQ ID NO: 760 - DNA, 397 bp, Nicotiana tabacum
tattatcgctgctgtttttgctgatcctctggtggacgctgttaataatttctccagtgccacgagcattccaactttcttcatctcattcattgcgctaccactggcaaccaactccagcgaggcagtgtcggctatcatctttgctagccggaaaaataagaaatccgcgtcattaacattttctgagttatatggagcagtgaccatgaacaatctcctttgtctgtcagtctttttggcaattgtttacatcagaggattgacatggaacttctcatctgaagtgctggttattctaatcgtttgcgttattatgggggtcttagggagtatccacaccacctttcccctctggacttgttcgatagcttttctgctttatccaatgtccctt

SEQ ID NO: 761 - DNA, 487 bp, Nicotiana tabacum
cacggcctcggcaacgacttcatattggttgacaatagagatacaacagaacctaaggtcagtcctgatcaagctgtgcaactatgtgacagaaacttcggaattggtgctgatggcgtgatatttgcaatgccgggtgtcaatggcactgattataccatgaggatcttcaattcagatggaagcgagccagagatgtgtggtaatggaattcgatgccttgccaaatttatagcggagcttgagaactcccgtggagagcgaagtttcaccatacatacaggggctggacttattgttcctgagattcaagaagatggaaaggttagggttgacatgggtgaacccattctgaaggcatcagatgtacccacgaaactaccccctaataaagatcaatctgttgataaagcaagactagatatagatggaagtgaatggaatgtgacctgtgtcagcatgggaaatcctcattgtgtcacttttg

SEQ ID NO: 762 - DNA, 298 bp, Nicotiana tabacum
cacaaggacttctcagtggatgaagatagccagtggatgctgcaaggatggaaaggacgtgtagtttacgctctctcttgttggaagcctgctcagcaatcgtaaaattatgtagtagtaacttattaggctatttctttgcttctcctatatatttcacctaaggttgagctattgtcaactttaggtcatggctgcttgattgaattttcttttttgtttgtagcagcattgtagaatctgtttatttggtttcaatgccactgaattattcagaagctctgccattatccataaa

SEQ ID NO: 763 - DNA, 200 bp, Nicotiana tabacum
ttcatttttcttgagccatgccggaatccaatttgaacggagcctattatggcccttccattccgccaccagcaaaatcctatcaccgccacggccgcggcagcagctgcaacccatgtagctgtctctttggctgcctctgcaattgttttttcaaaattatcttcacccttctgatcatcctcggagtcattgcatta

SEQ ID NO: 764 - DNA, 528 bp, Nicotiana tabacum
ctggtggtagtaacagtggggagggcataggaactcctcataatggagccttccaacataatcataaccaagcaagtgccacttttctgcctactgttgtttggttttattccttgagatctcactcttacgtgcatcaattgaagttcagatcagttgttcacttggtaaggtgcagctcccgagtgattgcaatcttacaagcagctcagatacactgttttgatgctgcaactctagagagggaatatactattgtcaccaatcctgttgtcacggggtttcctgctcctggaaccataggtgtgggacctctcgcagtaggtcccaggtggatagcctatagtggaagccagtttcagtctcgaattctggtcgagtcaatccacagcaccttactccttcggctagtttcccaagtccagctccaaatgggagccttgtcgctcattatgcaaaggaatcaagcaagcaacttgctgctggtattgtgactctaggggacattgggtacaagaagctgtcgag

SEQ ID NO: 765 - DNA, 348 bp, Nicotiana tabacum
ggctctttgcacttcaccaaatggtggtttgtttgctgctggttcagacagtgggatagtaaatatttataacagagaagaattttttgggggaaagagaaaaccaattaaggctattgagaatctcaccacgaaagtggattttatgaaatttaatcacgatgctcaaatattggccatcagttctagcatgaagaaaaatagctcaaagctaattcacattccatcatttacagttttttcgaactggccttctccaaatcgagccgtgcactatccacgctgtttcgattttagtcctcgcggaggattcatggctatgggaaatgctgaaggaaaagtgttact

SEQ ID NO: 766 - DNA, 334 bp, Nicotiana tabacum
gcctgcagccactgatagtgctggtggggaacgtggtttccactcctcacctgccgctgctgctgctgctgaatccattttggagcagaaggccttcttccgccctctagaggacttggacaaaccccagcacgcctaagtttcacattcccttaatagctccagtgcgtctatcctcactggcaaacttaagtctatatatagtgtgtagtggtggcttttaataagtttctgttttgcttgtgtttatgcgagtctgtattatatcaagtttaaagtgcagtatagactattagggtaaagctgcaccgcttttgaaggttccgttcatatg

SEQ ID NO: 767 - DNA, 271 bp, Nicotiana tabacum
  misc_feature (114)..(114): n = a, t, c, or g
gcataaaatgcagccctttaagcgatggactgatgatggaatgtgtttggcccttcttacccccgaacatgatcatttgataagcaggcagacagatgatgatgattacactcntcttgaaacgaactcgttccattttctcttttttgtttaattcaacttttactctcaattcagagcttattcatcttagtttacttagaatcttggacttggttaccacagacttagaaagtttccctccacagatactatgtctcatttggttgag

SEQ ID NO: 768 - DNA, 340 bp, Nicotiana tabacum
taacatttcttatcaacaggcaaacacacaaggcgttgtttggcaagtcagacttattcttcatttgcatgatgcaccctttatcatttgacattcaaaagcaagatttagaaattgaggcagcacaggtttgtcaagttcaatttaacaatattcaccagtgttattaaaagccatcacttcatcgcttcaagtgatgaaacgatgcaaggcaagaggttattgcttcatgggtgaaacgatgagtgcaaagtgaagcagtcggtactttgactctcaactttgaggagttggactaatatcgcatattgtatagtgaatactgcaattagtcattata

SEQ ID NO: 769 - DNA, 319 bp, Nicotiana tabacum
cacggaccttagggcttatacgccataatacgaattattcgaaacgagtcctgcaacgccaattgatcttgatcttctgttctgtacttccaaccactctccaaagcttctcatcagctgtatacggaaaatggccggcggaggagaccattctcatggcggagacttcagggctaaggtctggagtatgagtggtgggccctactgtaggcccaagcattggcagcgcaataccgctattgcccttgccggaatcgtactcatctgcattcctgtggctttgaaatccgccgagcttgagcaaaggccacatcttcca

SEQ ID NO: 770 - DNA, 200 bp, Nicotiana tabacum
aagtcatatgaatcaagattatggcttgacaacgtacgatccacgttatgctcatacaggctatgcggtagagtatgcacaccaaccacaatatacgccaccacctcctccaccaacgtatttaaacgcaccgcaaatgttcagtgatgaaaatcctaatggttgcaccatcatgtgaatgacacgaacttttaagtaaa

SEQ ID NO: 771 - DNA, 238 bp, Nicotiana tabacum
agactggttggagatgcctggttcattaatcctacttctagtggttgcacccaacctctttgctgacactttcagagacagttgggctggcactgcggtgtgtcttttgattggttgctatctgctccaagagcacatcagagcatctggtggattcagaaattccttcacacaaagcaatggtatatctaacacagttggtattgtccttctgttggtttatccaatctggtctctg

SEQ ID NO: 772 - DNA, 318 bp, Nicotiana tabacum
agaacagagtggtgtcggaataattctactctggtcccctgttttttgtttgcgaggaaattctcacgaggggctgcaatgcgcctcttgagtgaaggagtagtttctcagttcgatgcctcctccataatgaactcaactccgtgatttcatgagtctctttttaatagttttgaccttcacagtatacttcgatgaggggattagttgcccttgatagaattacaatctacgtgtgttacaacacctctagcttactgatataggaaatagacagacaggtggaagctgattgtagtatggttcatgtaagactta

SEQ ID NO: 773 - DNA, 507 bp, Nicotiana tabacum
tgccggtcttccctatacaacaatctctcttaattcagcgattgttgattcgaacagagctatggtaggaacaagcgcagtaattgaatcggtcagctccgctgtgatcggaaaaggggtggtagcggacagtcgacttgatctgacgactgtggcggagccggtgccgccagtggtgaaatcggacgatgtagatggcgcggttaatgacggtgaggagcagaagagggagattgtgttagggcggaacatacatacaacgtgcttagctgttacggaacctgatgctgatgatgaatctaccggtgataaggaagcctatatggctagtgttttggctcggtatcggaagactcttactgatcgaactaagtaccatttagggtatccatataatttggactttgattatggtgcactcacacagttgcagcatttttccatcaataacttgggggatccattcattgagagtaattatggtgtgcactcaaggcagtttgaagt

SEQ ID NO: 774 - DNA, 446 bp, Nicotiana tabacum
aaaatatggccaaaagccaattaaaggctctcctcatcctaggggatattacaaatgtagtagtgtaagaggatgtccagcacgtaaacatgtggagagagcactagatgatccaactatgtttattgttacatatgaaggagaacacaatcattcccattcaattacagaatcaccagctgctcatgtccttgaatcttcttaatctcaacggctcagatcttatttggatttgtgaagactaaatcagcaccgttgaaagcttaatgcaaaagatcaaatggtcaatgcctagaggaaaatgaaaaggaagaggcaacatttgtttatttttgtttctctatgtaattgtcgttgaaaacttttgattttgcgtggaaaatgaaaagaagagatagagagcaaattgtggatttggtgggaattgaatcaatgcaacatagtgg

SEQ ID NO: 775 - DNA, 289 bp, Nicotiana tabacum
tgccacaatataaagatttgcccccggaagaggttgaggagtttcacagacgggacgggtttgaggttggagatgctgacaagatatttgaaagtacatcgaaggatcagttaacccgtcgtgctgcatgaggaagagtgctaaattagttgaatattttgactgtatgagctaatttttggcatgttcagctggaagattaatccaaagttaactgttggaggatgatattgtagctctgaagtgtataatctgatcttctgtagctatttaaaagaataaaattact

SEQ ID NO: 776 - DNA, 250 bp, Nicotiana tabacum
agaggcgaaattatcaagcgagcgtcaacgaacgccggagaaaatgccgtctgaaaaagagattgaagagttttttgcagctcgccagaaagctatacttaaacgatttagaaaaaagtacaacttcgactttgagaaagaggagccattggaaggtcgctacgaatgggtccgaataggaagttgaagattgaattcgcaagactgaccacaacagtatcaattgctgctgcttcatttatttttgctg

SEQ ID NO: 777 - DNA, 345 bp, Nicotiana tabacum
ttcatgaatctgttaataattccttaagactctctgtttctgatcttcctatgctttcttgccagtatattcaaaagggtgttttgttaacccaacccccaactgaattaacttccactcatcttatttcccatctcaaaatttccctttctaaaactctctcccatttccctcccttagctggccgtctgatcactaattccgatggccacgtgtatatcctctgtaacgacgctggcgtcgactttgtacacgcgaaagcaccccatcttacaattgccactctaattccaccaaattactccgatttgccactttacttcagaaaattcttccaattcgata

SEQ ID NO: 778 - DNA, 431 bp, Nicotiana tabacum
gcttattaggatgataaagtcgctttgccccaagatagtcactttggtggagcaagaatcaaatacaaacacggccccatttttccctaggtttttagaagctctggactactaccatgcaatgttcgagtcaatagacgtgaccctagcgagggacaggaaggagcggatcaatgtggagcagcattgtttggctagggatatagtgaatgtcatagcatgcgagggcaaggaaagggtggaacgtcacgagctactggggaagtggaaatccaggttcatgatggcaggttttcggcaatatcctctgagctcttatgtgaattcagtgataaaggacctcgtgaggcgttactcggagcattatacactagtggagaaagatggggctatgctgttgggatggaaggagaggaacctaatctctgcat

SEQ ID NO: 779 - DNA, 261 bp, Nicotiana tabacum
catggccagccaatctagcaagcctcaatctatttatgacttcactgtcaaggatgctaagggaaaggtccttatcattgtcaatgttgcatcacagtgtggcctgactaattcaaactacactgacatgaccgagatatacaagaagtacaaggatcaaggtctggagattcttgcattcccttgcaaccagttcggtggacaggagcctggaagcattgaagagatccagaacatggtttgcactcgcttcaaggccga

SEQ ID NO: 780 - DNA, 608 bp, Nicotiana tabacum
accatatgggagagctcccaacgcgttggatgcatagcttgagtattctatagtgtcacctaaatagcttggcgtaatcatggtcatagctgtttcctgtgtgaaattgttatccgctcacaattccacacaacatacgagccggaagcataaagtgtaaagcctggggtgcctaatgagtgagctaactcacattaattgcgttgcgctcactgcccgctttccagtcgggaaacctgtcgtgccagctgcattaatgaatcggccaacgcgcggggagaggcggtttgcgtattgggcgctcttccgcttcctcgctcactgactcgctgcgctcggtcgttcggctgcggcgagcggtatcagctcactcaaaggcggtaatacggttatccacagaatcaggggataacgcaggaaagaacatgtgagcaaaaggccagcaaaaggccaggaaccgtaaaaaggccgcgttgctggcgtttttccataggctccgcccccctgacgagcatcacaaaaatcgacgctcaagtcagaggtggcgaaacccgacaggactataaagataccaggcgtttccccctggaagctccctcgtgcgctct

SEQ ID NO: 781 - DNA, 314 bp, Nicotiana tabacum
agcagaaagaccgtaaagcagcagatatggagccaaacaaagtatcaacatggagcaaaatagtaggggtgttacacactttcttggaagagctaactgcacctccaacacttggagctattgtaggattcctgtttgggtctgtaacatggctgaaaaatctggtgattggtgacgctgctccacttagagttattcaagattctgtcaaattacttggggatggaaccattccatgcatcacccttatacttggaggcaacctaacccaaggattgagaaaggcacaagtaaaaccattgatcataatagca

SEQ ID NO: 782 - DNA, 440 bp, Nicotiana tabacum
atgttcaaatctgaggtgtggcatctgtgtcgttttgaatctgtttgttagagtttctgtccccgccacggataggctgttggttgtaatattatcgtcaatccttttgccttttcttgtggatgggctcttatagcagtaatttcttttgctagtgtctactagtagtagttgctcttattctatcaaaataattctgtgattgaatctagttttcaacttgcacatgttagtttcttcctttgacattgtgattgagtctggtgtccaacttgcacatattagtaatcgttgttgtagtcttattatatgtctctgacactgattaaatatcttgtagtctggttgctgcaagccctcaaacgactgcaactccgagtacgtgagcccaacaaactggactaggacaccaagctcatcccttaataatcctgactgta

SEQ ID NO: 783 - DNA, 338 bp, Nicotiana tabacum
agcagtgttaagagggaaggttgaagaattagcaaaagcagagcaaagcgaggtgaatcaaagggggagtttgatagaagctgttcaccaactcgaagaaaagatagctacactgcagaaactgacagcagataaggatgaaaagatagcagagtatgaaaagaagatgaatgacaaagataagggaatcttagacttgagtgagggaaaaagggaagcgatacgacagttgtgtatatggattgattaccaccagagtcgatatgatggtcttatagagatgatctcaaagactaggggaagaaggcaagtaactgcttgaaattccttcgcaaatg

SEQ ID NO: 784 - DNA, 234 bp, Nicotiana tabacum
  misc_feature (17)..(17): n = a, t,c, or g
  misc_feature (84)..(84): n = a, t,c, or g
tacttagggttggtgtnacttgaaactattgcaaagaattgcgagaaggcattctcagagattgcagctgagagggttctggangagatggtgaagctaattgatgaccctcaaactgttgttaacaatcggaacaaggccctggtgttaattgaagcttggggagaatcatcgagtgagcttcgctatttacctgtgtatgaagagacttacaagagtttgagatccagaggg

SEQ ID NO: 785 - DNA, 365 bp, Nicotiana tabacum
agaaacaatttctcttgcacaagtagctgtcatgggagtagcttatcaagttaaccaattctggttccctctcattatcctcctcctctccattaccatttcttctatttctggagctgaaccaaattgtgtgtacacagcttacattcggactgggccattcatggaggatgcaactgactcaaaaataagcttgactctctacgatgcgagtggctatggaattagaatcaagaacctagtggcttggggtgggcttatgggctcagggtataactactttgaaactgaccactcagatatgttcagtggccatggaccatgtttgactgggccgatctgcaaaatggtcttgacttctgatg

SEQ ID NO: 786 - DNA, 351 bp, Nicotiana tabacum
  misc_feature (250)..(250): n = a, t, c, or g
tacatttgatatggccaatggacttgctcctaacgaggcagctcgtaaaaagaagccctcaattaaaccccataaacaacacaagaaatcacaaagaaagaaagaccggtcgtggagggtccagaatggtgatgctgatgggatgccagtagtaagagtcttccagaaaccagctaacactggacctgtgagcatccgataggtgtcgatggaagttgatatctttgctcagcggcgaactgctcaaganggaaaaaaaaaaggcaaaacatgttatttctgatagttggctctttggctcctgcctctgttgccatgtgaactgccgtttcttaccctacattattgcaa

SEQ ID NO: 787 - DNA, 264 bp, Nicotiana tabacum
aattcgtcatggtagaggcagttgaagaagaggagctcttgataatgatgaaaaattgttcttcgtcgatggaaggcagcttgggccaatctgtcaagtgaaatttgttcccaaaatatcgtcgtaaatttacaagagctttgtaagcttaattctttaccagtttgagaatggatttatgtttcctcatcaaccacttttcgtggctgtccgttgatcctttgatctagcttctgaacttaccactaccattttccaacagag

SEQ ID NO: 788 - DNA, 407 bp, Nicotiana tabacum
agaggcgtaagacggagaccatggggaaaatacgctgctgaaattcgtgattcggctaaacatggtgctagagtatggctaggcacttttgaaacagccgaagaagctgccatagcttatgatagagcagcctttagaatgcgtggtgctaaggcactcctcaattttccgtctgaagttgtcacagcctctgcttcagtagatagattactactacgtcccccaagtttgagctcagatagttacactaattccaacaattcaaattctagttcaaatgaagtttcaagtgggttgattaatacatttgaatcaagaatttcaacggaattttctcaagatactaagacagagtatatggagaattccttggcactttgaaccaattgcacggtcgatgttaagtt

SEQ ID NO: 789 - DNA, 363 bp, Nicotiana tabacum
taccctttgatggattgggtttagtgccttatacacagcagcatctgacttggactcaacatgctttcaatgagaagattggagaggttcagagggtcgcgaaggagtcgtttgtgaggttgaaaaggcgatggtcttgcttgcagaagagaacagaggtgaaacttcaagatttgccagtcgtgctaggggcgtgctgtgtgttgtataatatatgcgagatgaagaatgaggagatggatccagagctcaatttcgagctcattgatgatgagatggttcctgagattcaattgagatcgactgatgctaggcttgcaagggatgcaattgctcataatcttttgcaccataaccatgctg

SEQ ID NO: 790 - DNA, 493 bp, Nicotiana tabacum
tgcaagcatacttacaattaccaatcatcaaaacatttggagaaataagaaaatgtccttaccggagcttgagctccctggcttccgttttcatcccactgctgaagaactcatcaacttctacctcaaaagcattatcaaaggcaacaaacttgactccaatgtcattgcctttgtcaacatatatctccatgatccttgggagttacctggattggcaagaataggggaaagagagtggtatttttttgtaccaataaacagagaacatggtcctaaagggaagcctaacagaacaacaagaaatggtctctggaaggcaactggttctgattgccaaattcgttcaacattagacccgaggaaggttattgggctcaagaagactttggttttctatggtggaagggcacctaaagggtgcagaactgattgggtcatgaacgagtacagacttcctgatggccaccccttacctaaggatcatgacata

SEQ ID NO: 791 - DNA, 381 bp, Nicotiana tabacum
aacctgggtacggatatccaccggtgcaacaacctaagaaaaagaacaagtttggaatgggaggtggattaggcttgggattgggtgctggattgcttggtggtttgttggtgggagatatggtttcggatgttggagagatggctgcttatgatgatggctacggagatgccatgggagatatgggtggctttgatttttagattagttttggtgctttgtaattttgtttattttgttctttggagatataataagctgcagtactgagcaggctctgctcgacgagttaaaggctttggaagagcatctcaaggctcacggaccatatgtcaatggggcgaatatttgttcagtcgatttgagtttggctccgaaact

SEQ ID NO: 792 - DNA, 298 bp, Nicotiana tabacum
atatgaagagatgattgagaattaccacccgggtcttggtgatcataggtggccacttgttactcactttgtgggttgcaagccttgtgcaaagtttggagcttattcagtagagaggtgtttgaagcaaatggatcgtgcattcaactttggcgacaaccagatccttcagatgtatggattcactcataaatcacttggtagtaggagagtgaagagaacacggaacgaaacaagcaatccgcttgaagtgaatgatgagcttgggttacttcacccaccatttaaagctgtcaag

SEQ ID NO: 793 - DNA, 259 bp, Nicotiana tabacum
tacttactccttttaccataggaagcattatgtgcagagaaacattgaacaaggaatctgttattgaggagattgttaatgaagctcaagattccatacttcctggcacgagtgaagctgcatttcttgaaagagtctccaaacttatcgatatcaggcttgagaagatagagaattaactcttctctagaattgtaagtatgtatttgttgtatatatacagtgaccagtccataatatgtagatggaactgaaggca

SEQ ID NO: 794 - DNA, 371 bp, Nicotiana tabacum
aataaacctagttatcagctttctgctattcaacttgccaaccaactggttgaaaggaacatcgacttggtttatggaggtggaagtgttggcttaatgggtctagtctctcaagcagtttttaatggtggccgccacgtgttaggggtaattcctaaaactcttatgccaagagagattacaggagagagtgttggagaagtgagggcagtctcagggatgcaccaaagaaaggcagaaatggcaaggcaagctgatgcatttatagccttaccaggtggctatgggacattagaggaactcttagaagtcatcgcttgggctcaattaggcattcatgataaaccagcaggtttacttaatgtagatgg

SEQ ID NO: 795 - DNA, 266 bp, Nicotiana tabacum
ttgattctgatagcagtgattccgaggttggtcctaaagagcaatctcttgcgggtagaagtcaattgggtagtggattctctcgtaggactaaagcctcttcctccagcttagatacaaacttttcctctaagtttaaaatgagctatgagccagctgttaattccgactcgggtttagacagaaaacccagcaggaactcattcagtgctaaagtacaggaaccccagaaacctgtcatgagttcttatgttgctgatacacaa

SEQ ID NO: 796 - DNA, 272 bp, Nicotiana tabacum
cagagaacctcaagaagctgctccatcgtttccaagaaactgatgaagatgtacacagctctgaggtggacagttctgcatctacaaaatttgatccaaatgattaccaagtgaactcacaagtcactgacacgaccagtcttagcagtgtgcaggcctcagaatatgaggatgctgaatcagcgtacaatcaacatccaacttctggatttcactcatttcttgatgctcagccaagtatgacgcagaaagctggagagggccttgctgta

SEQ ID NO: 797 - DNA, 382 bp, Nicotiana tabacum
gtgaagaaagcaaataagaaaagatgagtagaatagtagagtatggttggcaaaacacgtcgtcgaatgagtatcttgatcatattaaacgaatggagagatcgccaaccatgcaccctgatcttcctctctacccaaatgtccactccctcttcaaaaatggatcagggagcaacggacaagaaaagaaatgcactctaccgcagtcccagaagaaggttcatttcgcggaagcagctgaacttaccaagaacgaaaagattgaaacgaagaatattgacatggaggctgatggatatataaagcagaagcacatgaactttgagctccacaaatggagaaccttcaaagcttgttaaagagtttccaacttgcttataac

SEQ ID NO: 798 - DNA, 422 bp, Nicotiana tabacum
tcaagaaccagcgtcaggcacgtttctcgatcgcgcggtccgatgtggttcagctcttaaaccttggacaccatgaaagagctcttctgagggttgagcaagtgatcaaggaacagaacatgttggatgtgtttgtcatggtagaaggctattgtcttctgttagtagaaaggatcaaccttctggaacatgaaaaagtttgtcctgaggaattgaaggatggcaatatcgagcttgatttatgcagcttcaaggtgtggcgatgttcccagaacttcaagatgcttcgtgttatcttcacgtcaaggtttgggaaagaattcacagctcgtgctgttgaattaagaaacaattgtggagtaaatcctaagatgattcaaaagctgtcaacgaggatgcctagcttagaacatagaaccaaa

SEQ ID NO: 799 - DNA, 298 bp, Nicotiana tabacum
ctagctgatggagttggtgaggccgctcagatttattgtgaattagtccgtcttggagcgggtatgaagttcattgatattggaggtgggcttggaattgattatgatggtactaaatcatgcgattctgatgtctctgttggctatggcactcaagaatatgcctccgcagttgttcaggcggttcaatatgtatgcgaccgtaagggtgtgaaacacccagtgatctgcagcgaaagtggcagggcaattgtttctcatcactcaattctgattttcgaagccgtgtctgcttcta

SEQ ID NO: 800 - DNA, 288 bp, Nicotiana tabacum
gggtgaagaatagatcaaaagcttggtgggatcaatgtaacagtgctgatttccccgatgaggagtttaaaaaggcgtttcgaatggggaaagatacatttgagatgatatgtaatgagttgagctctgtggtggcgaaagagaacactatgttaagagatgctgtgcccgtgaagcagcgtgtcgcggtttgtatatggagattggccactggggagccacttaggttggtttcgaagaggtttggattgggtatttcaacttgccataagctcgtgttagaggttt

SEQ ID NO: 801 - DNA, 244 bp, Nicotiana tabacum
tccttgcatatttggtgttttgacatgtgataccttggagcaggctttcaatcgtgtcggtgggaaggctgggaataaaggtgccgaaacagcgttgacagctattgagatggcgtctttgtttgaacaccacctaaaggcttaagaggtggaggcggcccttcttacgagctcactgtttaccgcaagaatgttgttgtgattcttacctttaaaaagaaacttgttcccgtcaccatctgaa

SEQ ID NO: 802 - DNA, 296 bp, Nicotiana tabacum
aaagcagcgcagccagagttttattgaccgtagtggaattggccatcgttctggccccaatggcgttgctaattcaccacctttgatgtcatctaatatgtcggattggggctccccgactgggaaattggagtggggctttaatagcgaggacacgaacaagctcaagagatctcaatcttttggttttcgcggtggaaatgctgctccaacaagatcaccaatcgcaccatctcaagtcaatgagccagatgtctcgtgggttcattccttggtgaaagatgtgtcctccacgg

SEQ ID NO: 803 - DNA, 451 bp, Nicotiana tabacum
gtcatataaactcgttatcattttcaccgctctccttgtggttattgctgcttgctccacgaaaattcatgtgatggccctaagagatctacctaaagatgtattaccaattgcagcgaaactatttcaagaacaatatgatgcaacttgtgggaaaccttgtaatactagggacgattgctctaaaggttggctctgtagtgaatgttataattttagaaagacttgtgggccacttattggtgatgttattatgggcatgtgatttcagtattacttctccttccgaccttcctgagcaccggacaagtggcagactttatacatcgtgttacctcgtattaacagagtaacatagtcctgtatttttaataaataaatagccgctctaccaatccggttgagttgttgttgtgttgttttagtgtctcttttgtctttgaaattgtct

SEQ ID NO: 804 - DNA, 274 bp, Nicotiana tabacum
ttacgttaagtatggctgaccaccctaatcttgtcaaattaattggttattgtgtcgagggagatcacagggtgctggtctatgagtatatggctcttggttcactagaagaccatttacatgacccttggccagataaaaaacggcttgattggaacacgagaatgaagatagctgcaggtgctgcaaggggcctggaatatttgcatgacaagatgaaaccgcctgttatttatcgtgacttgaaggggtcgaatattctgcttggggaggg

SEQ ID NO: 805 - DNA, 329 bp, Nicotiana tabacum
gttatagtggcgctcgatatgttttcacgtatattgcttatgtggttcgtcacaaacaagtattcgctgtcaaagtattttaggagagttctgtttgaggtaggttgagaccagatcaatcgggatgaagaggcaactagtcaccaactattgacaaggaaaaaaacgtaattacatccagtattacaccaacctagtcctaatgtgacatgttctcacatgtacatttacaaatatataccccaatttttatttaaccattataaattactagtacatagtttttgtgtaagtatcgggtgcttatgttttttgcctaatgtcgctag

SEQ ID NO: 806 - DNA, 269 bp, Nicotiana tabacum
gctcatttaaattttccacatagaatcggtttaaatgaaccggaaccggttcgagttacggcgaaaagacgagcatcgcctgaaccggctagttcgtcggaaaatagttcacctaaacggagaagaaaggctgttgcaactgagaaatctgaagcagtagaagtggagagtaaatcaaatgttttgcaaactggatgtcaagttgaactattgacacgtcgacatcaattattagtcagttaagtatgaacttaggatattcaattgtg

SEQ ID NO: 807 - DNA, 526 bp, Nicotiana tabacum
ctcaagcaatttccatgtcttacgacagaaaatccttcgagtgtgaagcatcatcgcatgtgaagctgcaaaaggaagaagagattgacatggaaatcaattcaggcaaaaatggagctatagcacaatgatttctttcggaattgttcaataggagatacagactcaaatcagcatatgcagtggaatggcgattctgttaaacatgtcttcttgtaaataactacctggtaatcgttagcggggtcgagcggccgcccgggcaggtagcaaaactatgtatagttattcttcctctcctaatggcatgtcttgtcggcgtttcacgtgtggatgactactggcatcattggcaagacgtgtttactggaggattgataggccttgtcgttgcaacactctgttacctgcagttcttcccagctccataccatacagaaggatggggaccatatgcatatttccgagcagtggaggagttccgcagtagcacgcaacatgtccaccctactaacggaggattaga

SEQ ID NO: 808 - DNA, 306 bp, Nicotiana tabacum
ttatggccgtggttgacacattatcaactcattcacccgacgaagaatacataggagatagacagcaaccgtctacctggaccggggatgcagagattgttgaagcgttctatgatttctcgtccgaaataaggagaatagagaaggagatagatgataggaatgctgatacgagattaagaaacaggtgtggtgctggtgtgctaccatatgaactattggcgccaagttctgaccctggagtaacatgtagaggtgttccaaatagtgtatcaatatgagcatgtatgtatagttatgatgcaa

SEQ ID NO: 809 - DNA, 360 bp, Nicotiana tabacum
tagttatcgccaaaaccttgttacctcagtgagtcacactctgtaaaattgatagtgattaggatgaaggctgtagtgataacaagtccaggtgggccagaggtgttgcagatacaacaagtggaagacccacaaatcaaagaagatgaagtgttgatcaaaatagcagctactgcccttaatagagctgacacccttcagcgccaaggtaaatacccaccccctaaaggtgacagtgaataccctggtcttgaatgttctggcactgttgaagccgtcggcaaggatgttactcgctggaaaattggtgacctggtatgtgctctcattggtggtggaggttacgcggagaaagtagct

SEQ ID NO: 810 - DNA, 277 bp, Nicotiana tabacum
cgtctgtgtcatcaccagcaaatcacaagtccttttatgtgtcatcatctttattatctccttcaccaaaatcacctctatcgccgttgacttacaacagaaatctcagagaagaggaggagaaggaggaggcggtgtgttccacgtcatcatcgtcgacgattttgaagaggaaaagaccggcgaggatcacgattccgattggctcgttgagtttagaacacgcgccgagggaagagagtggtcaaatggatgaagtggaagttgaagaagaagg

SEQ ID NO: 811 - DNA, 336 bp, Nicotiana tabacum
cttcgtcaatggagaattcggggactttggttatgttgctcctgagtacgctcgcactcttatggctacaccaaaaggtgatgtgtacagtttcagtgttgtacttcttgagttagtaactggtgagagaccgacctctgtcaccaaagctcccgagacctttaagggaaatctcgtggaatggatttcaaatctctctggtgaatctaagcttcaagatgcgattgaccattcgttgtctggtaaaggttatgacactgagattttccaggtccttaaagttgcttgtcggtgtgtgttgtctgctcctaaggagaggccgacaatgtttgaagt

SEQ ID NO: 812 - DNA, 295 bp, Nicotiana tabacum
attatatgatgatcatttttaaaataaaaaagcgccatcaatagaatcactgcatgaagaaaccaacaagggagaaaagcagagaggttccgatcaaagcaccagaaatcggcaaagaaaaaccagctccggcgtcgggcgatggcgccggtggcattccaacttcctgtgccgaagctgcaatggcagcgaccatgacaacgagcacgaatgccttgacaatgttaacttgcgccatttctataaaattgaagaaagaataaatactcaaattggtttcaggagctgatattga

SEQ ID NO: 813 - DNA, 364 bp, Nicotiana tabacum
cttattaggaccaggaggcaacaaacaatcaagaggtgtaaaagtcatattcccaagtggtgaaatcagacatttttatcaaccaataaaagcagcagaggtaatgctagagacacctaatttctttcttgtaaacacaaggtcacttaaaattggaaggagattttctgctctgaatgctgatgaagatcttgatatgggcaatgtctatgctatgtttcctatgaaaagagtaaattcatttgtctcagcagctgatatgggagctttgctacttactgctaactctgtgtccaaaagggtgtcaattggaagtttcagaatcttgcctgaatcatgtgtagagtattctgctttggaaata

SEQ ID NO: 814 - DNA, 314 bp, Nicotiana tabacum
aggaaaaaagttgaggagggaaagaggagggaggcctctttagaaaatgatttggcaaatatgtgggtgcttgttgcccagctaaagaaagaaaatactgctaggcgagactcaaagctggcaggtgactggcagaatgatggagaaaacaattcgattaatccagaaattaatgatggtgaccacaaggaccccatcccggatgttagccaagacggggatcatacaaatacagctgctgaggttacgaaggaagaacctcttgttgtccgcttgaaggctcgaatgcaagaaatgaaggagaaggaacacag

SEQ ID NO: 815 - DNA, 419 bp, Nicotiana tabacum
gcaaccaagcaaacaacatgttcctttttcctggaataggacttggtactctcctgtcgggatctagaattgtttcagatggcatgttgcaggctgcagctgagtgcttggctgcatatatgacagaggaggacgtcctcaagggggttatatacccttcgatatccaggatacgtgatataacaaaggaggtagctgcagctgtggtaaaggaagctatagaagaggatctagcagaaggatactgtgaaatggacagtcgagagttacggaaacttggtgaggtatttttactttatgaaccagttatctttggagatatataggagcttcccgaaccgtgtgttgcacctgggactgttttgactatgtataattaccccagtatgaatgaactaaccaataatatatagtatgaa

SEQ ID NO: 816 - DNA, 749 bp, Nicotiana tabacum
cccctcccgacagtgccggggtatgatgttgctggtgtggtagtgaaagttggtagtgaagtaaaggggctaaaagaaggggatgaagtttacggagatatacatgaaaaagcattagatggaccaaagcaatttggatctttagctgagtacactgctgtagaagagaaactagttgctttgaaacccaagaatctgagttttgcagaggctgctagtcttcctctagcaattgaaactgcttatgaaggtcttgagaaagctggattctctgctggcaaatccatacttgttttgggaggtgctggtggtgttggatcccttgtaattcaggttgcaaaacatgtatttggagcttcaaaagtagcagctacatccagcacagggaagttggaactcttgaaaagcttaggagttgatttagctattgattacaccaaggagaattttgaacatcttcctgagaagtttgatgtcgtttatgatacagttggtcagggcgaaaaggcggtgaaggcagtgaaagaaggtggaagtgtggtagtgctaacaggggcagtaacagcaccaggttttagatttgtagtgacatcaaatggagagatgttgaagaaactgaacccatacttagaaaatgggaaggtgaaaccagttattgattcaaaaggaccattcccatttgataaggttgtggaagctttctcttatcttgaaactggcagagctacagggaaagtcgtcatgtaccc

SEQ ID NO: 817 - DNA, 184 bp, Nicotiana tabacum
cggggataggctttgcgactttagtgacacatctgacttttggtcgcttgcttcaaggttttgattttagtaagccatcaaacacgccaattgacatgacagaaggcgtaggcgttactttgcctaaggttaatcaagttgaagttctaattacccctcgtttaccttctaagctttatttata

SEQ ID NO: 818 - DNA, 262 bp, Nicotiana tabacum
cggcgatgtctagctctttagttgttgggctcgtcggagagtggcggattcacggcggcactatcgtcggaggcttttcccggctacgactacgccggaggaggaggaactgtggggacggaggaagttagtccaccgccttatccattttctttattaggcggtggcttttagtttgtgagaccttcgttttgtaattatgtttattcatgcaatatgttactaaatgcatctgaaaagtgagacctcctagttaacctta

SEQ ID NO: 819 - DNA, 525 bp, Nicotiana tabacum
cggggaaaatattgcacacataagaagggaacatctggggataaatttgagttcaaggcccctcggagtgggatgtacaagttctgttttaagaatccttattcaacaccagaaactgtctctttctacatacatattggacacatccccaatgagcatgaccttgctaaagatgaacatttggaccccattaatgtcaaaattgctgaactaagagaggcattggagtcagttacttcagagcagaagtacctaagagcacgtgatgctcgtcatcgtcatactaatgagagcacaaggaagcgtgttatattttacacaattggagaatatctgctgcttatattggctagtgggcttcaggttgtgtatatccgacaactgtttagcaagtcagttcgctataaccgggtttgacaaatttaggttgtagcatagtgttttttcacctctgttctacaggaacttgagttgttttggtcagtgagggaagggcatccctctgtagcatcttttcttaagtta

SEQ ID NO: 820 - DNA, 577 bp, Nicotiana tabacum
cggcacaggattatgaaattcttgagagagcaagctgcattatcagcaactgaaataacagtggattcggtaaaggaatttgcggctgagtctgaaggtgacagtggattggaagaattagcagattattctaaggaaaccaaacattcgtgggagaaaatcctcaagaatgttatggagacatcatctgcaagtatgagtactgaagatattttccaactccgtagtactagtattcagattcccaaggtaaatgggaaacataacaaatgcatgcagcatatgagtttgaaggccacaggggagacattgtcacaaggaaatggtgttggcaaaatgatacttgctaacataccaaggtacagggaagttctgccaggattggacggctggctggctagcaaagttgcaacttggcataacctggaagggcactctgtccagtggctttgtgttgtcagcatggatcgaaaaggcatgatggcgaatgttacttcagcattggcagcccgtaggcctcagcatatgttcttgttcggttgagacgggatagagggaagggaatggctgtcgagct

SEQ ID NO: 821 - DNA, 563 bp, Nicotiana tabacum
cggctaaaactcaataatattttttggctcttataaaaaggagtatgtaatttcaccccttttaagatggaatagtagaaaagaatactatatactttaacccccaaaagtaatattgtaatagttccaactatttcgaagcgggagtaaagggcctctttgtcgtcctgcttgccactcgaagggctacttaataattaacgcctgacatattaggagttactattactgttttgtaacattagtgcatctactttattttactacatatgttgttattttatttccaccatttaaggcgtttgttattttattttttttgctttctggtctgttaactaggcctttgtaacttgtttgtgtatataatcagctaatcattatttaataaaattatttttttttgtttcatcttgctcattcattatatggtatcagagtggtctccttgactctcatgagttttttttttcgatcctctaactaccaccacaagctcacacttaaaatggcccctaatgtaacaaatgttgactctactagcaacaactctaatggtattg

SEQ ID NO: 822 - DNA, 562 bp, Nicotiana tabacum
acgaacagtccaccttttgggaagcctcgagtacttacattgaagcaggatttacattactggccaacatgggagctgaggtttgatccaggaactgctatgtggcgacgcaaaacaatcaaagctttgactctggtgttttgtgaacttacttggctgattaggttttcctgtggggagtgcaaaattggggaacgtgtagaaagttcaccggctgcgttggtagttactctaacttattggagttgaaagtcgccatacatcaatatatgcaaaatcatataaagcaggtatctggctttatatactatttgttgtaaatgaccatttatcagatgaaattaataagtggtagaattttagacaagttataagtgctagcgctatacatgtctttgtgaatcagagtatgtaaaccatgaactaggaggggactttttgccaccagattcttggttatacccctttttgccctctaggctaaatccattttttttccttttgaaatcattgtgtcaatttagctgacagtgttagatcccatttatgccattgctataat

SEQ ID NO: 823 - DNA, 444 bp, Nicotiana tabacum
tattaattcattaaacagtgtatcccaagttaacacttaacaaccccagctaaaactatgaacagatgagattttccggttttacccctcgcctaactacaaaggtaaaattacaagaaagggcctagtaatctagtacaatactactgcattacattcctgattcaagggtaggaaagccagaaaaagagttaaatccaaacacacccgaactaccgtcaacaatcaccgcagacggcgaatgtgcggcggagagagtccccgccggtggttgagccataaacgatgaagtggggtccagtaaaaaagctgatgtatcaagagtaggcaagcagctaacttgctgaacccggtcaaccggtcgtctcggcttcggcttcaaaatagaagcaaccgtcacgtgtccgtttccttccattctcactccggtcacctgctgtccat

SEQ ID NO: 824 - DNA, 446 bp, Nicotiana tabacum
gggcggcgggggtgtccggggcgtaagtcccgactgccgaggtgtaagtctcacggaactaagccccacacataagtcccggggcgttttacgagtgctccgctccagggcgagccccgggcgagtcccaattctgccttttaaaacagagctaattactatagtacaaagtaattttattctgtgcagtggagcatgaagtactcgaaagagaaagaggaagactacgagcattatatcagcaacagcaactgccacagtcacagcagcaacagcaatcatcttccagccatcggcgcagcactagtagggatcttgatcaacaatttgcaaacatctctttgaaacataaagacgtttcaggccaacttcacatgtgactctgactgtagctaggacgtaaatcacatcttcctgactctccctcagctgatttttcctggaat

SEQ ID NO: 825 - DNA, 238 bp, Nicotiana tabacum
aatcactagtgaattcgcggccgcctgcaggtcgaccatatgggagagctcccaacgcgttggatgcatagcttgagtattctatagtgtcacctaaatagcttggcgtaatcatggtcatagctgtttcctgtgtgaaattgttatccgctcacaattccacacaacatacgagcccggaagcataaagtgtaaagcctggggtgcctaatgagtgactaactcacattaattgcgg

SEQ ID NO: 826 - DNA, 382 bp, Nicotiana tabacum
ccggggtggacgtcgtgaaggaggcggcggatacggaggtggaggatatggaggtggaagacgcgagggcggcggtggtggttacggcggcggcggttatggtggtggccgtgaccgtggatatggcggtggtgaccgtggatacggtggtgatggcggatcacgctactcaaggggtggtggtgactctgatggaaactggaggaattagataattgagaagatgtggattttagttattttgatcgcattttaagttgggtatatcttaatgttaagtgtgactgtcttttttgaccgttattggctcgttactttactgtgtttttctgtttacagagttcttatggaatgaattaaatgaagtctacaaattaaatct

SEQ ID NO: 827 - DNA, 279 bp, Nicotiana tabacum
cggggtgctggtggtggctatggagctcagccgatgcagtaccaaaatccgcagatgcagggcggtgcaagaccacagggtggtgcaccttacccaggctatggaggtcactaggaaagcttaagattccttgataaaatgcatcaaacttttagttttggactggtgattcttctgaagttccgggcactctccaaatgaagtcttttactatgacaaaagttaccttttgcttaaagaccatgatcttcaatgtgtattttctttttattcaagtaa

SEQ ID NO: 828 - DNA, 277 bp, Nicotiana tabacum
ggggtgctggtggtggctatggagctcagccgatgcagtaccaaaatccgcagatgcagggcggtgcaagaccacagggtggtgcaccttacccaggctatggaggtcactaggaaagcttaagattccttgataaaatgcatcaaacttttagttttggactggtgattcttctgaagttccgggcactctccaaatgaagtcttttactatgacaaaagttaccttttgcttaaagaccatgatcttcaatgtgtattttctttttattcaagta

SEQ ID NO: 829 - DNA, 243 bp, Nicotiana tabacum
agagcccaacaaggcaaagagctgcaacaagtcccaaagctgtaactccagtacaatccaagaaaagccatatatcagcaagagaggtgtcctttccagtcaaatggagtttatagacaatgccatactggaagacaaaaaaatctgagactcaatattgtttctagtatccgtcctctcaaagtctggatatgaatctgttcttcatcccaccaggactcccagctgtcgtctccccggaca

SEQ ID NO: 830 - DNA, 266 bp, Nicotiana tabacum
  misc_feature (191)..(191): n = a,t, c, or g
cggggtgatgaattcaagggttacgtattcaagattatgggaggatgtgacaaacagggtttcccaatgaagcagggagttttaactccaggccgtgttcgccttttgctgtaccgcggtactccttgtttccgggggtatggtaggagaaatggtgagcgcagaaggaagtctgttcgtggatgcattgntagccctgatctttctgttctgaatctggttatcgtgaaaaagggtgagaatgatcttcctggactgacagacac

SEQ ID NO: 831 - DNA, 514 bp, Nicotiana tabacum
tgtcgaaaaccacaatttaagaaatttgcacgaattcgaacttacacagtgaaataaaccgagaaatctaatcttattccaattctaacttgcactggtagttttaaaaacgaccaattacagtaaagacccgacacagtaagcccgaaacccgacccacaataagctcaaaaaggaaaaaactggaaaaaaaaacgaaaaacggcagatcagtacgctgcgatcacatagttaactagtttagatcatcattaacattaattaatacgattaataatctaagagagttgaccacagtcagcaatcacaacgggcttcgagcacctgccggagctagatccaacggcctccactttcttaatcacatccattccttcaataacttgaccaaacaccacgtgttttccgtcgagccactcggttttggccgtacaaatgaaaaactgcgatccgttagttccagggccagcattagccatggagagaattccaggtccagtatgctttttaacga

SEQ ID NO: 832 - DNA, 299 bp, Nicotiana tabacum
acctatattccctagccaatttttattagttctattgttaaaggttaactaggaggtctcacttttcagatacatttagtaacatattgcatgaataaaaataattacaaaatataggtcacacaggctaaaaaccacctcctaataaagaaaatggataaggtggtggactaacttcctccgccgccacacttcctcctcctccgccgccgtagtcatagccggaaaaagcctcggacgacggtcccgtcgtgaatccgccactctccgacgagcccgacgacaaagaactagacata

SEQ ID NO: 833 - DNA, 298 bp, Nicotiana tabacum
cctatattccctagccaatttttattagttctattgttaaaggttaactaggaggtctcacttttcagatacatttagtaacatattgcatgaataaaaataattacaaaatataggtcacacaggctaaaaaccacctcctaataaagaaaatggataaggtggtggactaacttcctccgccgccacacttcctcctcctccgccgccgtagtcatagccggaaaaagcctcggacgacggtcccgtcgtgaatccgccactctccgacgagcccgacgacaaagaactagacata

SEQ ID NO: 834 - DNA, 517 bp, Nicotiana tabacum
cagaataacatgagaaatctataattttgaggaaggtttgcttgaactccgaccagcaatgaactcttgcagtttcttaaagtgatccttggacattccatcgtaatacttgtgtgccctctccttctcaagagcaagggctcgggtcaagtcttgtttgaacccatcattgattactgccttgtacttcaaaaccaggtcgtggttgttcttgatgatggcttctgctatttgcctagctttctccaaaagttcacttctgtctacaacataatttaccaaaccccatctctcagcttgttctgcgctgataggcattgcagttaaagatgcttcacgagctcggctgggtccaataacacgagagagttcttgagatggaccccaagaaggaaatatctcaaacctagcatgagtgtccaagaatttagcatcattagaggcaaccaacaaatcacaagcaagagaaatctcaaaaccagcagtcacagcaaatcccccaatagccccaatgata

SEQ ID NO: 835 - DNA, 483 bp, Nicotiana tabacum
cgggtggacgcagatgagtttcctctctgtaaatattttaactgtaggaaggcttgaaatctgcaatacccagcaactgcagataaatcgtcttatcctggaccaaaacatataaccagtggaggttgggtttctggaccgagaaatggaaggccttttatgttctttgttgccaatcatctttcttggcagttctgccctctttttttgtgcaattacataaatataaagaggctgacaccaaattttggttctagagcgtccatctgccatgcttttatttgatgcagttgcattgtaccttaaattcacttggttcctaactttagctttagtctgattcacagataagactagttcaagggtatattatcaatagtgttgcgagaaccgtgttttaccttctagccattatttgtgaaccaaattattcttgagagctaggaaaagaatactttggtttatgttgagatcccagggtgt

SEQ ID NO: 836 - DNA, 406 bp, Nicotiana tabacum
ggcaagaaagcatgtggagagggcaaccgatgatccaaaaatggttattgtaacttacgaaggagagcatcgtcatgtaattgaagggacgatcgccggcgccggagctggaagttccggcgagagaatgatggtgttcgattcaacggaacagagaaaaggataaacagcttagggatttaggggctcttttgtaatttcgaggtagtggaaagggtggaattgacatttggagaagactaaagagcagagaatagagatacggtgggtagggttttgtatgtaaatttggggaagattggggcagaaacgaaaaaaaagtcttttggggttgttaaaattttgactattttttattttatttaatacgaccatcgagaaggtttacaatttttaagtttgaaaa

SEQ ID NO: 837 - DNA, 184 bp, Nicotiana tabacum
cggcaccatgaaaccgctgtagaggaagagaagaaggcacaattacgaaaccggctttcgccattgacagaactgataaagcacgagatgcaccacttacgagtatagcttcattcctcagtaaatggcatgagctcctcgggtataatgtcagcggtccacacccggacacccccgcctccca

SEQ ID NO: 838 - DNA, 572 bp, Nicotiana tabacum
cggcgacgagcctatacgtgagaagatctttcattttagcagagaagctattttgaagctgaaattctgagccaacaacaaaatggcagttaacggtcaaaacggaaaaactaacgggaagatagcacccgttaacaacgagccggctttgcaaaacggtgcggctgtgaagggtacggcttcggagatttcatcattccaatcgttgagtgctcagttgtggagatccgtgacgcggaccaggaagttggacgggagcaaaacgacgacgtttaggatggcggtgaactgtcgccatcggctcgagcaaaagatggagccgctgtattttggaaacgcgattcagagtatcccaacggttgcttccgttaatgagctgttaactaacggcttgaattggagcgcgaatctgctacatcagaatgtagtggcgcatgatgatgctaccgtgcgccggggtgtgaaggattgggaaagtaatcctaggttatttcctttgggaaatttcgacggagctatgatcactatgggaagttcacctagatttccaatgtacgataacgatttcgggt

SEQ ID NO: 839 - DNA, 251 bp, Nicotiana tabacum
cggggcattgaagtcaccaaacggagacgtcggagttgacggaatgataagcgtgataggtcacgaactagctgaactatcatcaaatccgttagtgaatgcgtggtatgctggggaagatccggttgcgccgacggagatcggagatttgtgtgagggattgtatggtatgggcggcgggggtgtccggggtggacgtcgtgaaggaggcggcggatacggaggtggaggatatggaggtggaagacgcg

SEQ ID NO: 840 - DNA, 591 bp, Nicotiana tabacum
cggccaatggcttctatacttatgatgcattcatagctgctgccaattcctttcctggttttggaactagtggtgatgatactgcccgtaggaaagaaattgctgcctttttcggtcaaacttctcatgaaactacaggtggttccctgagtgcagaaccttttacaggaggatattgctttgttaggcaaaatgaccagagtgacagatattatggtagaggacccatccaattgacaaaccaaaataactatgagaaagctggaaatgcaattagacaagacctagttaacaacccagatttagtagctacagatgctactatatcattcaaaacagctatatggttctggatgacaccacaggataataagccatcaagccacgacgttatcatcggtagttggactccgtccgccgctgatcagtcggcgaatcgagcacctggttacggtgtaattaccaacattattaacggtggaattggatgtggcgtaggtccgaatgccgcagtggaagatcgaattggatactacaggaggtatcgtggtatgttgaatgttgctcctggggacaacttggactgttaca

SEQ ID NO: 841 - DNA, 567 bp, Nicotiana tabacum
cggcgacgagcctatacgtgagaagatctttcattttagcagagaagctattttgaagctgaaattcagagccaacaacaaaatggcagttaacggtcaaaacggaaaaactaacgggaagataacacccgttaacaacgagccggctttgcaaaacggtgcggctgtgaagggtacggcttcggagatttcatcattccaatcgttgagtgctcagttgtggagatccgtgacgcgggccaggaagttggacgggagcaaaacgacgacgtttaggatggcggtgaactgtcgccatcggctcgagcaaaagatggagccgctgtattttggaaacgcgattcagagtatcccaacggttgcttccgttaatgagctgttaactaacgacttgaattggagcgcgaatctgctacatcagaatgtagtggcgcatgatgatgctaccgtgcgccggggtgtgaaggattgggaaagtaatcctaggttatttcctttgggaaatttcgacggagctatgatcactatgggaagttcacctagatttccaatgtacgataacgattt

SEQ ID NO: 842 - DNA, 183 bp, Nicotiana tabacum
cggcaccatgaaaccgctgtagaggaagagaagaaggcacaattacgaaaccggctttcgccattgacagaactgataaagcacgagatgcaccacttacgagtatagcttcattcctcagtaaatggcatgagctcctcgggtataatgtcagcggtccacacccggacacccccgcctccc

SEQ ID NO: 843 - DNA, 483 bp, Nicotiana tabacum
atgggtcatttacaccagacgcgatggatccatacacagacaaaatgaatatctggcagaaaatcgacaactggttatcagttttgtacattaagccctcgctctggaagatacacgagaaggcggcgagagaccatttcagggaaacatacggccccaaatatgaagcccttgttgatggatgctggacaaatatcagcctttcaatgatttcatcaaactttttgtactactatccgcgtcttcacggcccaaatgtcattgaattgggacctctgcatttgaatgatcaccagcaaaactcccaaagaatctgcaagattggttggacggggcagaaaaaggagtaatctacttcagtcttggtagcaacatgaaaagtaaagccttaccagaaaatgtgcgggaaaactttctgagatttttcagagagctgccggctggttacaggtactgtggaagtgggagctcgatggcaaaata

SEQ ID NO: 844 - DNA, 229 bp, Nicotiana tabacum
aacatcatcacaccatttatttatatttatagcaaatgctagtcagtgaaagctatttcaaacacaaccacaacatttatttaacatgcagttcccaacactctactgtatcaccccggaaggaaacaaactggcaaacatacataaaccgcttctcaccaaacttatccaggtgtaatcaggcacacagcactattactataaaacaccatcacaagaaaacacaccc

SEQ ID NO: 845 - DNA, 442 bp, Nicotiana tabacum
  misc_feature (430)..(430): n = a, t, c, or g
atgggtcatttacaccagacgcgatggatccatacacagacaaaatgaatatctggcagaaaatcgacaactggttatcagttttgtacattaagccctcgctctggaagatacacgagaaggcggcgagagaccatttcagggaaacatacggccccaaatatgaagcccttgttgatggatgctggacaaatatcagcctttcaatgatttcatcaaactttttgtactactatccgcgtcttcacggcccaaatgtcattgaattgggacctctgcatttgaagacaccagcaaaactcccaaagaatctgcaagattggttggacggggcagaaaaaggagtaatctacttcagtcttggtagcaacatgaaaagtaaagccttaccagaaaatgtgcgggaaaactttctgagattcccccagangagctgccggct

SEQ ID NO: 846 - DNA, 204 bp, Nicotiana tabacum
cggggtcaaccgaggatcaggtggggagccttgacgagggataaaactcaggagttggaggggaggttgatggttatgggcgcctggaggagtagcggggacgctagcgagatgtggacagctactgcagactgtataagaaaggcggcgagagaggtactaggggtctcgaagggttactatgccgggcacccccgcctccca

SEQ ID NO: 847 - DNA, 408 bp, Nicotiana tabacum
cggcagcaacagtgagaccgattgttagggcagcgacggcttgagtgtgttgtctgttggcgtcacagactccgaaaacgacgaggaccaaaatgaatccaagaatgaattcgattccgagtccttgaacttcagtcaagttagcattaagggaggtaactccgaatccgccagtgtaaggagatggatgtcatgccttaaggagatgcagatccagcaatagcgccaagaacttgaacgacgatgtagaggaaagctctgatcagtgtcacttttccggcagcgagaagtccaacagtgatggctgggttgatgtgagctccacttacgtgacccaacgtgtgaacgagggcgaagacgattgaaaccgaaagtgagggcaatgaggactagattgggccggacacc

SEQ ID NO: 848 - DNA, 190 bp, Nicotiana tabacum
cgggaatgctttggagtgcgtagtatagtgcgcgtcagcctacccaactctgtatgcatagataccaggtatatgctgggtctgtgtccagagtagcatgaacaggcctttcctgtttgttgaagtttacctcatatgtcaattgcaagcaggaaccttgagttgagacatcagagatcgctggtatata

SEQ ID NO: 849 - DNA, 291 bp, Nicotiana tabacum
accctcatgcaggcgcccaatcgaatcggtcaaaacgctaacccagctcgaagaccttaaggttttaaagcatccgttgcactcttttccttcgaccaagttcttatctcgaaaaagggtttttaccggcaaggattttaacgaggcaacatctgcatgctacctaagggaaactcaagaaacaccctggaagccacccgctcgaaaaaaccaagaaatgccgaacgggttctcctataggaaagtaatgtaccagtgccaaacagtcaaacgaaccgtgtccatatggcc

SEQ ID NO: 850 - DNA, 259 bp, Nicotiana tabacum
ttttgacaagaacagaagcagtgttgtgcttctaaatatttatgcacacttcaggctgctttagattgcacaataaaatcaacaattattaccaaaatttcacaatttgggtgattattgcaaccttgcataatccttattatcaacttctatgccatccaaatcccctacaaataaatatatcaatagacacgtgccttgggtgggaatgtctcgacctcgtcatctagagtgttcatatgaactggtctgtactcta

SEQ ID NO: 851 - DNA, 278 bp, Nicotiana tabacum
gtgctggtggtggctatggagctcagccgatgcagtaccaaaatccgcagatgcagggcggtgcaagaccacagggtggtgcaccttacccaggctatggaggtcactaggaaagcttaaggtgtgatctccctctcatgcattgcatgttggtgtctaatgcttatagagttaaattagctacagggcaatattgtactctacatgaaatttcttacaatggactttagtggttcctttgattaatgatcagtttgcctttattgcattgctaaaaa

SEQ ID NO: 852 - DNA, 547 bp, Nicotiana tabacum
ggggagcagaacttggggaaggtccagcagtgtttgcagttcctgagctattggcaggccctgaagatgaaacaggatgttttctctttctcccagtctggttttttgaagcctgatcatttccccgaaaagaatttgacatgcttccatctcctgcaacactgccagggccaataattttatcttgttgcagactgtgatttgaactctgtggttgcggaccagaaagtgtgtgttgaggaagctgctgctgttgcgacagttgtggattaccagtatgctgttgctgctgctgctgctgctgctgctgttgctgttggaattgggccatcctcaacttgagcaaaatatcttgtggaggaccaggaccctgtgaagctgaactcatatttggaacaacatcaccaacagaatttgaaaggccatctttgcccatactagagttccgattactaaggagcattcgtagccttctgctttcgacgtactagcagatggtgaggtcagttctgctgtgctaggataagttgctgctggtgttgaggtg

SEQ ID NO: 853 - DNA, 233 bp, Nicotiana tabacum
ggtgtgttttcttgtgatggtgttttatagtaatagtgctgtgtgcctgattacacctggataagtttggtgagaagcggtttatgtatgtttgccagttgttccctcccgggtgatacagtagagtgttgggaactgcatgttaaataaatgttgtggttgtgtttgaaatagctttcactgactagcatttggctataaatataaataaatggtgtgatgatgttttaaaa

SEQ ID NO: 854 - DNA, 247 bp, Nicotiana tabacum
gtgtgtttgcttgtgatggtgtttgatcgtaatagtgctgtgtgcctgatatacacctggataattttggtgagaagcggttcatagtatgtttgccagtgctcgtttcctgtccggggtgatacacgtacgagtgttgggaactgcatgttacaataaatgtatgatggtagtgtttgaaatatctatacactgactagcattgtcgctataaagtataaataaatggtgtgatgatgttttaaaa

SEQ ID NO: 855 - DNA, 204 bp, Nicotiana tabacum
cggggtcaaccgaggatcaggtgaggagccttgacgaggaataaagctcatgagttggaggggaggttgatggctatgggagcctggaggggtagcggggatgctagcgagatgtggacagctacatcagactgtataagaaaggcggcgagagaggtactaggggtctcgaagggttactatgccgggcacccccgccgccca

SEQ ID NO: 856 - DNA, 301 bp, Nicotiana tabacum
accagcttctacaagatcaggaagtgacaagacagaagcagtgttgtgcttctaaatatttatgcacacttcaggctgctttagattgcacaataaaatcaacaattattaccaaaatttcacaatttgggtgatttattgcaaccttgcataatccttattatcaacttctatgccatccaaatcccctacaaataaatatatcaatagacacgtgccttgggtgggaatgtctcgacctcgtcatctagagtgttcatatgaactggtctgtactctagccggacaccccctccgccca

SEQ ID NO: 857 - DNA, 184 bp, Nicotiana tabacum
cgggtgtggaccgctgacattatacccgaggagctcatgccatttactgaggaatgaagctatactcgtaagtggtgcatctcgtgctttatcagttctgtcaatggcgaaagccggtctcgtaattgtgccttcttctcttcctctacagcggtttcatggtgccgggcaccccctcctccca

SEQ ID NO: 858 - DNA, 235 bp, Nicotiana tabacum
gtcatcgggttacgccgaaaaaagtctacgagttatgccggaaaggtcctctggttatgccaggaaaagtcaccaggttatgccggaaaggtcctcgggttatgtcggggaaggtcatcgggttatgccagaaaggtcctcgggttatgtcggggaggtcttcgggttatgccggaaaaagtccacgggttatgccggaaaggtcctcaagttatgccgggcacccccgccgccc

SEQ ID NO: 859 - DNA, 405 bp, Nicotiana tabacum
ggtgcccggcagtatagttctgagctacttcaatctgaacttgagaggactagaatcaatacagcatgctttgtggaatcaattcccctggactctgttccagaatcggctaaggcagcatatgcttcttttagaggacctatggattctcccactagaaattttaggggatcacaacatattggatccccaagtttctccaggccaagacgtagataaataagtatccatttcttttctgtcagtttttcttatgtaatgcttgtgcagttgttgtattttagcagtttctacattcttttgttagaagaaagaattttgctgattcattcatgtacgtagaattgaagctgttttccgccagtacggtttcaaaagattttatgcaattttctttatataaaa

SEQ ID NO: 860 - DNA, 298 bp, Nicotiana tabacum
gtgtccggcagtggcttttgacttgcctttttaattccgtcctccgctgtctcaattctttctcttcattttatcctatcatagataactgcctttattttatgcttatgtaaatatgtctaggaagtgaagtttctttttattcgaagaaggtaatatgtaatcatgtacgtatgtgtgtttctctacttggtccataatttagcgaaatagctgttatgttgcacgcacatgtgtgtataatggactcaaaatgagggaagagggaagacagatcataacattttgctgataaaaa

SEQ ID NO: 861 - DNA, 375 bp, Nicotiana tabacum
ggtgtccggcacgatcaaacagtggctgatttcatgtgattttattaggtagtaccccactaaaattatgcttagttcggttttggactcaaactgcaaactaaggtgtggctatggggtgtacctaaagcacaaccatttgaggtctttccataatgtatgtggtcctacttgagagttctgttatcttgttctattagatattagtgatatgtgtggccagtgatggcgtaacattcatttatgttagtgtttttggtgttagaggagatatagctcaagttggactggttggcatatactgtgtattgccaaaatttggttgttatgggcatgctatatcagtttggcaccatttttatgttggcgctaaaa

SEQ ID NO: 862 - DNA, 406 bp, Nicotiana tabacum
ggtgcccggcagtatagttctgagctacttcaatctgaacttgagaggactagaatcaatacagcatgctttgtggaatcaattcccctggactctgttccattaatcggctaaggcagcatatgcttcttttagaggacctatggattctcccactagaaattttaggggatcacaacatattggatccccaagtttctccaggccaagacgtagataaataagtatccatttcttttctgtcagtttttcttatgtaatgcttgtgcagttgttgtattttagcagtttctacattcttttgttagaagaaagaattttgctgattcattcatgtacgtagaattgaagctgttttccgccagtacggtttcaaaagattttatgcaattttctttatataaaa

SEQ ID NO: 863 - DNA, 534 bp, Nicotiana tabacum
caagtcgttcacaacccacttttgacaaagaacacaagtcgttcttagccaacactaagacctgcccacgcctagccttagtccattttgaaacactttgaaaccctcacgtttcactcttgtttcccacttagaatttcacataaaattgcacacaccaatctgactaagtccaaaggccctatttatagcacataggcagcctttaggacttgacaacacattgacacttattgtctatagcttttgccacttgtcgggctaaggctaaatcagttcctaacttgtagttgacatccccaaatgcttaggccatgttatgcgcgaaattataatggatacaagcataaatcagtcatgggtacaagaggttatgaaaaggtaaccgccaaactaccttggcatgtgcattgcatgtgccatcttgacttggccagctgattcacgcccaaggctggcattgcgcccaaccttggctcattttgacattgctccgcaccaatgccttgcccgcaatccgccgcccatgatttt

SEQ ID NO: 864 - DNA, 277 bp, Nicotiana tabacum
ttttttttttttttttttattgaagttcctttagtataaagaagctgaatttggcaaaagcataaaagacatgatatggaaatatcacaatacgtgtgcagtagttaagcactgggcatgtattaccatacatatagagacatgacttcctaaatacaaaaggtaatttaattatgttgccgattttaatgattcaacttgagattttccagaaggacctttggttctgattaaagctcgatactcattaaacgtcgccggacacccccgccgccca

SEQ ID NO: 865 - DNA, 327 bp, Nicotiana tabacum
taggctaacaactactaagcttagttcatgagaacaatgcagccgctaatgcagggaggagaatacagaagagaatcaacagttaccagccttactattagagcatccaagtatgtgacctaaaggtcgatgaagtaggtgcaaaccatgaagaattgaaaatcatagtagaaaccccatcagagacaaagcactaggcttcacatctgcctaagtctcggtgggcaaagttacacaacacctgttctagtcgaggtagcaaggtagcagatacccggtgggaatagccgaggtgcgcacaagctgcccggacacccccgcctccca

SEQ ID NO: 866 - DNA, 355 bp, Nicotiana tabacum
ggtgcccgggtagcggttcctcacaggcagtggcgaatcgcttcagtagtttctaattattctcctttggctcatggaagggtcctaaggtattcttttcttataggaatttctttcttaggaactttttgttctcattagcttgcctttcttggcttgtactattctgtgtcagttggtcttttgtagttttttaacagttgtcactattagtgtcttaaatagagttatatagtgtacttttatgatgtccagattgttggttaggaggtaatataccactcttggcaaacacctcatttgtatttgaactgcacagttaattaccatacaaaatgaatgttgaaggttaaaa

SEQ ID NO: 867 - DNA, 443 bp, Nicotiana tabacum
ggtgtccggccccattcaagcagttccttgaggcagtgacaaatatgaaatttgatgaggaaccaaattatgccaagcttatctctttctttgttattcttattgagccagtcacgtcactacgaccaataagaattggagctcttaaggttgggcagaagcggggaagattgctaataaacttggaggaagatgagcaaccaaagaagaaagtacgattaggtagtcctgcaacacaatggatttctgtttataatgcacgacgtcccatgaagcagaggtaccactataatgtagcggactctaggctccggcagcatgtagacaaaggaaatgaggacggtctttacatcagctgtgtggcttcagcagccaatctgtgggccttaatcatggatgcaggaaccggtttctcttcccaggtttatgagctttcagctgta

SEQ ID NO: 868 - DNA, 613 bp, Nicotiana tabacum
  misc_feature (547)..(547): n = a, t, c, or g
  misc_feature (576)..(576): n = a, t, c, or g
  misc_feature (607)..(607): n = a, t, c, or g
gttcaagtggaagagaattatgcagagccattgcactttggaccatacctctcaaccctctcatcaatccaagctctcatatcagctaaaacaagattggcagcatcatcaggctccccttgaatcaacgagtgatacattccatcgtaaagcttgagggatttgtccttgctgcttgccttttcgtacaacaacttcgagcctgtagggcatgtaacaccatcagatgtcccgtgcactgtcaaaaatggagcagtgaccttgtggaaattgttctggacgtattcacactgcctggcaatctccctcatagttcccacccttggcttcccggtatatctcctgggattgcttgcgattattttcagtttctcagtgtctctgatagccttgcccaccatcttgttgtccggcattgccgcccacgtatcagcaaatccaaatagcaacccatacatgaataaatgtaccttagaaggcttcataggctcaggaatgacaaaaagcggggcggagaagatcaaccccggtccaagtatctgggctncgattgaaagtacataagccaagtagctnacccacccattgattccccggacacccccgncggcca

SEQ ID NO: 869 - DNA, 349 bp, Nicotiana tabacum
ggtgtccggcatggacttagaacgattcaggtcacgtggagagacgataaccgctattcccggtggtgcctccggctgcgggagcaagttatgtggctggattacccctaatacgttgccgttttctttaactgaatcgttttcgttgtaagagacagctgaatttatatcttgcggtcctccgtgattaacggaattcaaaatattttctgttagagtattaacgggatttgaaatcgttgtcacgtgaccttttgaaacagaatcattgtactttccattttcgttggaaataatatcttcttctgctggtaagtaatactcatcccccggacacccccgcctccca

SEQ ID NO: 870 - DNA, 494 bp, Nicotiana tabacum
  misc_feature (411)..(411): n = a, t, c, or g
  misc_feature (415)..(415): n = a, t, c, or g
  misc_feature (428)..(428): n = a, t, c, or g
  misc_feature (446)..(446): n = a, t, c, or g
cggccgaagaagtaccagcaagacaccgaagacttcgtagtgcccgactcggacgacgatgccacgcccaaaacgccccggaagcggcggaaattaaacgacgcgaccacccctacatcgtcaaggaagagtccggccactcgaaagttcctgacccctacacacaaacggatagtgatcaagaagcagttagagtttacccctctgggcacgcgtgtcctatctccctcggccctcaactctccatttcagattgctcggaatcagttgcatgtatcttcggtacccgcagcactcccatgtcgtgaggaggaattctcgaccgtctacagtcacctggaggccagccatcaccgatggatccggatcctgtatttacatctctggtaccccgggcacccccgccgcccnaatncactagtgaattncgccggccgcctgccaangtcgaccatatgggagagctcccaacgcgttggatgcatagcttgagt

SEQ ID NO: 871 - DNA, 196 bp, Nicotiana tabacum
cggcaagtacagatggtcaaattattggaggcggagttggtggtcccttgatagctggaggcccaattcaggtgattgttggctcattttcagttgactcaaaagctggtggagtaaagaatgatatttctcagcaaattggtgggtcaccaatgtcaagtgtaggctttcgctcggtggttgattcttctcaatc

SEQ ID NO: 872 - DNA, 278 bp, Nicotiana tabacum
cgggccgcagaatatgtgaaacacgatcttttcagcaacctgataaggcatccaaaatttatatcagacaccaaatcagcaatagccgatgcatacagccatacagactctgaatttctgaaatcagaaaacaatcagcacaaagatgctggatcgactgcttccactgccatccttgtaggtgatcgtttactggttgcaaatgttggtgattccagatgctgttatctgcaggggaggcacagctattgctgtttctcgagaccacaagcctgaca

SEQ ID NO: 873 - DNA, 178 bp, Nicotiana tabacum
cggggcgtaagtcccgactgccgaggtgtaagtctcacggaactaagccccacacataagtcccggggcgttttacgagtgctccgctccagggcgagccccgggcgagtcccaattctgccttttaaaacagagctaattactatagtacaaagtaattttattctgtgcagtggaa

SEQ ID NO: 874 - DNA, 629 bp, Nicotiana tabacum
  misc_feature (515)..(515): n = a, t, c, or g
  misc_feature (540)..(540): n = a, t, c, or g
  misc_feature (559)..(559): n = a, t, c, or g
cggcacagcgaggacatcactaccgagaagctccgtgaggagatcaaggagaagatcatcaagcaggtcatccccgatgaagattgcttgattgacaagaccgtctaccacatccaaccttccggtcttttcattcatcggtggtccccagggtgacgccggtcttactggacgtaagattcatcgttgacacctacggtggttggggtgcccacggtggtggtgctttctccggaaaggactactccaaggtcgaccgttccgctgcctaccttgcgcgctggatcgccaaatcgctcgtgaacgccaagctggcccgccgcgcactcgtgcagctgtcatacgctatcggtgtcgccgagcccctctctctcttcgttgagacatacggtacctccgacaagtcctcggacgatgctcgccgagattgtcaagaacaacttcgacctccgccccggtgtcattgtcaaggagcttaacctcatcaaccccatctacttccagaccgctaaganacggtcacttcaccaaccaggagtncacctgggagaagcccaangagctcaagctctaattttaatgccttttgcatacagtgcgcatgaatcaacttcatcgcacatcaagat

SEQ ID NO: 875 - DNA, 230 bp, Nicotiana tabacum
tttttacaaaacgagcaagctcttaaaaatatataccagcaatctctaatgtctcaactcaagttcctgctgcaataaacatatgaggtaaattcaacaaacaggaaaggcctgttcatgctactctgaacacagacccagcatatacttggaatctataaatacaagttaggtagctgacgcgcactatactcgcactccaaagcattcccggacacccccgcctccca

SEQ ID NO: 876 - DNA, 283 bp, Nicotiana tabacum
cgggctaagtctgaagcaaccaacttcgaaagtgcatatggtgagccaattccggtgaaagaacttgcggaacgcgttgctagttatgtgcatttatgcacactgtattggtggctcaggcctttcggatgtggggtgattcttggaggttatgatagagatggacctcaactatacctggttgagccttctggtgtctcatacaggtactttggtgctgctattggaaagggcagacaagctgctaaaacagaaattgaaaaattgaagttatcggagatga

SEQ ID NO: 877 - DNA, 267 bp, Nicotiana tabacum
cgggtcgggtcgaatggcttgcagcagttgtggaggttcaggtacgggtcgtccaattccggtccaaatctccgttcgtcctcccaaccgctcaatttagaacctcggttcgtttttaactctgtaacagtcccatgtataatatctttgtagtacttatttcagattcttgaggttggaaaaagatacaaatttttatgtatttgtatatgtttggtggtacttgagagttagccttacatgggaattacttgttctatgctgtaa

SEQ ID NO: 878 - DNA, 205 bp, Nicotiana tabacum
cggggtgatgaattcaagggttacgtattcaagattatgggaggatgtgacaaacagggtttccccaatgaagcagggagtttaactccaggccgtgttcgccttttgctgtaccgcggtactccttgtttccgggggtatggtaggagaaatggtgagcgcagaaggaagtctgttcgtggatgcattgttagccctgatctta

SEQ ID NO: 879 - DNA, 316 bp, Nicotiana tabacum
tgcggacaaacaccaagaatcagttatattaggttgaaggaactaaaagtttaaagcaacaaatcaaatactcatgttcaacagagagttacaaactcataacatttaaccaaaccatgcgtttaagttcggaatgaaactgaaagtattgagataagataaaatgaaactttgcaattacttgactgcttctttcaaaattcaaacaaggatggacctctgaccggggccaggaccgttaaacgaaaactcatcggcgataacgacagtacctcgacttgtagctgaatggagtcccggacaccccctccgccca

SEQ ID NO: 880 - DNA, 228 bp, Nicotiana tabacum
tttacaaaacgagcaagctcttaaaaatatataccagcaatctctaatgtctcaactcaagttcctgctgcaataaacatatgaggtaaattcaacaaacaggaaaggcctgttcatgctactctgaacacagacccagcatatacttggaatctataaatacaagttaggtagctgacgcgcactatactcgcactccaaagcattcccggacacccccgccgccca

SEQ ID NO: 881 - DNA, 222 bp, Nicotiana tabacum
aaacgagcaagctcttaaaaatatatactagcaatctctaatgtctcaactcaagttcctgctgcaataaacatatgagataaattcaacaaacaggaaaggcctgttcatgctaccccgaacacatacccatcgtatactgggaatctataaatacaaattaggtagctgacgcgtactatactcgcactctaaagcattcccggacacccccgccgccca

SEQ ID NO: 882 - DNA, 522 bp, Nicotiana tabacum
aactcacattaattgcgttgcgctcactgcccgctttccagtcgggaaacctgtcgtgccagctgcattaatgaatcggccaacgcgcggggagaggcggtttgcgtattgggcgctcttccgcttcctcgctcactgactcgctgcgctcggtcgttcggctgcggcgagcggtatcagctcactcaaaggcggtaatacggttatccacagaatcaggggataacgcaggaaagaacatgtgagcaaaaggccagcaaaaggccaggaaccgtaaaaaggccgcgttgctggcgtttttccataggctccgcccccctgacgagcatcacaaaaatcgacgctcaagtcagaggtggcgaaacccgacaggactataaagataccaggcgtttccccctggaagctccctcgtgcgctctcctgttccgaccctgccgctttttcggatacctgtccgccttttctcccttcgggaagcgtggcgctttctcatagctcacgctgtaggtatctcagttc

SEQ ID NO: 883 - DNA, 325 bp, Nicotiana tabacum
cggtatccttatggagtacatgaacgtcggcacactagaaagtcttttaaaatcacaagcaactttctccgaacttagcttagcaaaaatcgctaagcaagtacttagcggactcgactacttacacaatcacaaaatcattcacagatttaaaaccttcgaaccttctagtaaaccgcgagatggaagtaaaaatcgccgatttcggagtgagtaaaatcatgtgcaggactttagatccttgcaattcatacgttggaacttgtgcttatatgagcccagaaaggtttgatccagacacttatggagttaactacaacggtta

SEQ ID NO: 884 - DNA, 286 bp, Nicotiana tabacum
aggttgaaggaactaaaagtttaaagcaacaaatcaaatactcatgttcaacagagagttacaaactcataacatttaaccaaaccatgcgtttaagttcggaatgaaactgaaagtattgagataagataaaatgaaactttgcaattacttgactgcttctttcaaaattcaaacaaggatggacctctgaccggggccaggaccgttaaacgaaaactcatcggcgataacgacagtacctcgacttgtagctgaatggagtcccggacacccccgccgccca

SEQ ID NO: 885 - DNA, 393 bp, Nicotiana tabacum
tagggacagaacacttagctttatacgtcgtagccaccaagtaggctttatttgtaacctactttatctcttcctagggttattcccttacatttgctcactgtgcttttatgtgctgttcatttcgtgagtttatgaggttgattgtcttcacttcctcacatgtttgagtttgactccattttattcatttacttaaatatgattatatgttagtttttacagttagattaatcacctcattatactgctgttagtttgggctcttttgagtttgttaattgatcagctttatcactttgtcgtgatactctgcgggttagctcactcatgctgtgggtcatagacgttttcttcttgttactccgttatattgacttagaccggtcacac

SEQ ID NO: 886 - DNA, 534 bp, Nicotiana tabacum
ttttgcacactttggtaattagggctttggccattacaagaaaaacaaacctttgaatatacaaaatatcaaccgatgcctaagaataaaaaaaaaaagagggtgggggtgcaagcactatcactcacttacaaaagcttcacattgtgaaataaacagaaaaaatgaaaaaagaaaaaaataaacaaacaaggatactccctaaaaaccgcatccatgccatgtgtcatatagtttagaataataaattcaactttttttcaggctttttcttttttctaattgagaataatattgtagtataaggttaaagttggggtttaccgagtgtgtatgtgattttttgttggtttctttgtaggaaatgaggtggttttccatattttgacacttgggaaaatccaaacaaccaccttttgttggcggggttagttagctttgctaattactccacgtccttgtgaaaatgctctttagcctattgccggaaagtctctgccaagccttcttagccccggacacccccgccgccca

SEQ ID NO: 887 - DNA, 405 bp, Nicotiana tabacum
catcaagcaaaagaggaaacgaaagcaatccacgccaaaactctcaaaccacactttatttttattgtttaaccttctttccagacgtatataggaagatgcttctcacagtatattctgcagtcaagcaaacctattccgcgacctgtgcactagctgcctccatcaggccgttgcgtatctgatcaccaatgtcacgaacatggccaggaccatgtggtatgaaaactgtcgtgttctttgaggagtttccaaggtctttgatggtgtcaaagtactgggtgatcattataagatccatcacttctttagcagaagtgccttctactttatgtgagaagttcaagatgttttctctcaaaccatctgtaattgcctgcctctgccgggcaccccctccgccca

SEQ ID NO: 888 - DNA, 419 bp, Nicotiana tabacum
cggggtacttaacagtgtaagtagcagtagacagtgaaagagattgtgacttcctggttagtaacaattccagctggtgctacctttgcagttatctacacatggatattcactaagctcttatcatacatactctgagtgtaaattaacagaaaacgccaccactcaaacttcttggattaattataaaatcacacagataacgtttctgtcgtgatttgagaaatgcaatttttgaaccttgtggaggatccatgatcaagagtagtagtccattcagttaggaagacgaacaagctttggtttctgcctagcacttttgtgttggatttaagcaaatgtgattttgtttctttgtattttacttccatatcaggttgttgatcttagatattaaagtttgaaactgttcttcaaaa

SEQ ID NO: 889 - DNA, 348 bp, Nicotiana tabacum
taccatcctgtgtgctgaaaatccggataagagtacccttgatacttgctgttgccagcacatgtccctcatgactaagtgcaaaagatgcagtcttagaatcatgcgcaaaaataaacttagtcctttttgaagtgaaatgctcaacacgaacttcaccatttcgtaatccagggcacaccagcacaggtgatccagccgcttgtgaaatctcacagagtccctttgtgtttacaattgtctcaatctggtggacgagcttcatgtcagcaaaattatatataaatatcttctgctcaagtataactacgatgcagtcacgtcgaagccggacacccccgccgccca

SEQ ID NO: 890 - DNA, 654 bp, Nicotiana tabacum
  misc_feature (544)..(544): n = a, t, c, or g
tttcaaaaggaaaaaaatggatttagcctaaagggcaaaaggggggatcaccaagaatctggtggcaaaaagtcccctcctagtttatggtttacattactctgattcacaaagacatgtatagcgctagcacttataacttgtctaaaattctaccacctattaatttcatccgataaacggtcatttacaacaaatagtatataaagccagatacctgctttatatgattttgcatatattgatgtatggcgactttcaactccaataagttagagtaactaccaacgcagccggtgaactttctacacgttccccaattttgcactcccccaggaaaacctaatcagccgagtaagttcacaaaacaccagagtccaaagctttgattgttttgcgtcgccacatagcagttcctggatcaaacctcagctcccatgttggccagtaatgtaaatcctgcttcaatgtaagtactcgaggcttcccattcaggtggactgttcgtacccggacaccccctccgcccaatcactagtgaatncgcggccgcctgcaggtcgaccatatgggagagctcccaacgcgttggatgcatagctgagtattctatagtgtcacctaaatagctgggcgtaatcatggtcatagctg

SEQ ID NO: 891 - DNA, 609 bp, Nicotiana tabacum
aaccgagtaaatctaatcttattccaattccaacatgcactggtagtagtaaacaccaccaattacagtaaagacccgacacagtacgcccgaaacccgacccacaatctcaaaaaggaaaaggctaaaaaaaaaacgaaaaccagcaaatcagtacactgcgatcacatagttaactagactagatcatcattaacattaattgatacgattaataatctaagagagttgaccacagtcagcaatcacaacgggcttcgagcacctgccggagctagatccaacggcttccactttcttaatcacgtccattccttcaataacttgaccaaacaccacgtgtttcccatcaagccactcggttttggccgtacaggtgaaaaactgagatccgttagttccaggtccagcattggccatagagagaattccaggtccagtatgctttttaacgaaattctcgtcggcgaatttggcgccgtagatcgattcaccgccggtaccgtttccagcagtgaaatcacctccttgacacataaatccaggaatcacacggtgaaatgatgatcctttgtagtgtaacggcttgccggacacccccgccgccca

SEQ ID NO: 892 - DNA, 425 bp, Nicotiana tabacum
ttttgagcaacaacaagaaagcttgctggtacttttacttgtataacatatccattatatgaaatatgtttagatccaaggctatccactgtgaatgaggggattgaattactccacatggaacgatagaaagattcacacggattgagaagcaagatgaacaaaaacaaaagtataacggaaactgtaagaagtcaaagtgcactctgtttcatccatgtcattcatcaaactcatgcatatgatccaagatgatagtttgcagccagctcctcatttttgttgcatgcaaaaaatacttgcaaaaccaaagctcgatcgaaacccatagcttcaagtcgttcgatagcctcgcgctcttccggtgtgacagtcacagcttgtggtatcgcccctgctggctgcccgggcacccccgccgccca

SEQ ID NO: 893 - DNA, 277 bp, Nicotiana tabacum
ttttaaagcaacaaatcaaatactcatgttcaacagagagttacaaactcataacatttaaccaaaccatgcgttaagttcggaatgaaactgaaagtattggattaagattaaaatgaaactttgcaattacttgatctgcttctttcaaaattcaaacaaggattggacctctgaccggggccaggatccgttaaacgataaactcatcggcgattaacgatcagtacctcgatcttgtatgctgaatggatgtcccggacaccccctccgccca

SEQ ID NO: 894 - DNA, 594 bp, Nicotiana tabacum
cggcttgctaatatcggagatcaagaagaaaacgcttgtcccacagcagtggtgcaatcccgcagtgatctcgacaaaggtatagcagtctacttcaaacctaaagagcccaaacatcagcagattgtggagtcttcttcgttaaacatcaatttctattttgatagtaataagtgtgctaacctaacagtgtggaaggtagacaactaccctatacctcgaaagtacagcacaataagcacaggtgcaaagttgggaaatcccctggatgtgaatagctggtttcaaattaagcctcttggtggctcgacgtataagctagtgttctgtccctacggagaggagtttacttgccaaaatgtaggcatcactgaggaaaatggatataggcgtttggttctcacagagaatgcaaaggcctttgtgttcataaagcatggcggattaggaaaggccgaagcatgattatgcatctgctttctaataaaactaagttgtgtaaaacatgtattaatgcaggccctgcattcggtgtttcactggatgtaagaataaataatgtaatgcagccctaataagtgccctatgcatgct

SEQ ID NO: 895 - DNA, 457 bp, Nicotiana tabacum
cgggctaagtctgaagcaaccaacttcgaaagtgcatatggtgagccaattccggtgaaagaacttgcggaacgcgttgctagttatgtgcatttatgcacactgtattggtggctcaggcctttcggatgtggggtgattcttggaggttatgatagagatggacctcaactatacctggttgagccttctggtgtctcatacaggtactttggtgctgctattggaaagggcagacaagctgctaaaacagaaattgaaaaattgaagttatcggggatgacctgtcgacaaggggtgattgaggtggccaaaataatttatggcagtacatgatgaggcaaaggacaaggcatttgaacttgaaatgagttggatatgtgacgagtcccaaccgccaacatcagaaggttcctgatgatatttagaggaagccgaagactgcagctaaagctgc

SEQ ID NO: 896 - DNA, 295 bp, Nicotiana tabacum
cggcggcggtgtaggaggagaaatcatgctgtttggtgtgagagtaaaagtggatcctatgaggaagagcgtcagtttgaacaatctctcacagtacgaacagccaaatgctaacaacagcgctgatacatctaaagtggctgaggaaggatatgcctctgcagatgacgctgttcaacaccactccaacagcggtcgcgagcgtaagcgaggagtaccatggacggaggaagagcacaagttattcctattaggattgcagaaagtggggaaaggagactggagaggaatctca

SEQ ID NO: 897 - DNA, 140 bp, Nicotiana tabacum
cggcttgctaatatcggagatcaagaagaaaacgcttgtcccacagcagtggtgcaatcccgcagtgatctcgacaaaggtatagcagtctacttcaaacctaaagagcccaaacatcagcagattgtggagtcttctta

SEQ ID NO: 898 - DNA, 202 bp, Nicotiana tabacum
cggggcgtaagtcccgactgccgaggtgtaagtctcacggaactaagccccacacataagtcccggggcgttttacgagtgctccgctccagggcgagccccgggcgagtcccaattctgccttttaaaacagagctaattactatagtacaaagtaattttattctgtgcagtggagcatgaagtactcgaaagagaaagg

SEQ ID NO: 899 - DNA, 529 bp, Nicotiana tabacum
gtgccggggctaagaaggccttgcagagactttccggcaataggctaaagagcattttcacaaggacgtggagtaattagcaaagctaactaaccccgccaacaaaaggtggttgtttggattttcccaagtgtcaaaatatggaaaaccacctcatttcctacaaagaaaccaacaaaaaatcactacacactcggtaaaccccaactttaaccttatactacaatattattctcaattagaaaaaagaaaaagcctgaaaaaaagttgaatttattattctaaactatatgacacatggcatggatgcggtttttagggagtatccttgtttgtttatttttttcttttttcattttttctgtttatttcacaatgtgaagcttttgtaagtgagtgatagtgcttgcacccccaccctcttttttttttatcttaggcatcggttgatattttgtatattcaaaggttgttttcttgtaatggccaaagccctaattacaaagtgtgcaacttgttctcttcaaaa

SEQ ID NO: 900 - DNA, 590 bp, Nicotiana tabacum
cggggcaaatgcgtcttcttctattattcttaccgctggtattgctgaggttgctgctggtgccatctccatgggacttggaggttacttggctgccaagagtgaggctgaccactatatgagatgagcttaagatgggaggaagatagatgatcatttctctaccagatacagaagcagcggagattgcagataattttgtcacagtatgggattcagccccatgaatatggaccagttgtgaatgctttgaggaagaatccacaggcatggcttgactttatgatgaaatttgaacttggtttagaaaagccagatccaaggagagcgctgcagagtgcgtttaccattgccattgcttacatcttgggaggactagtccctctgatcccatacatgttcattccaatcgcaagaaaggctgtcgtcgcttctgttttggtaactttactggccttactaatcttcggctacgccaaaggccactttactggaaacaaaccgtttaggagcgccttccagacagcactaattggagcagttgcatctgctgctgcttttggcttggccaaggctgttcaaggcggcta

SEQ ID NO: 901 - DNA, 428 bp, Nicotiana tabacum
cggcagcaacagtgagaccgactgttagggcagcgacggcttgagtgtgttgtctgttggcgtcacagactccgaaaacgacgaggaccaaaatgaatccaagaatgaattcgattccgagcccttgaacttcagtcaagttagcattaagggaggtaactccgaatccgccagtgtaagaaggtggagtcaatgccttaaggagagcagatccagcaatagcgccaagaacttgaacgacgatgtagaggaaagctctgatcagtgtcacttttccggcagcgagaagtccaacagtgatggctgggttgatgtgagctccacttacgtgacccaacgtctgaacgagggcgaagacgatgaaaccgaaagtgagggcaatgaggactagatgggccggacaccccctccgcccatcactagtgaat

SEQ ID NO: 902 - DNA, 513 bp, Nicotiana tabacum
cgggcaaacgtggtgcgtggcgagtggtgaagcggggaaggataatctacaagcagctctagatttcgcttgtggtgagggcggagctgattgccgttcgattcagccagggtccacgtgttacaatcctaacacgctggaagctcatgcatcatatgctttcaatagttattatcagaagaaagggcgtgcgatgggttcgtgttatttcggtggggccgcgtacattgttcatcaacaacctaaatatggaaactgtgaattacccactgaagattgaaaaggagaggggatagactgaattttgatgaccatagttgtttaaggatagcagcagctcttattaatcttagctcctttcaattcagactattctttttttgtaatttttatctcattagttggtgttggtcgaggagagcaatgacttagttctagttgttgcttccctttttgtaattgtgttgacaacttgacatcaccttactactagtatatgttgcttgttttaaa

SEQ ID NO: 903 - DNA, 560 bp, Nicotiana tabacum
cggggcgtaagtcccgactgccgaggtgtaagtctcacggaactaagccccacacataagtcccggggcgttttacgagtgctccgctccagggcgagccccgggcgagtcccaattctgccttttaaaacagagctaattactatagtacaaagtaattttattctgtgcagtggagcatgaagtactcgaaagagaaagaggaagactacgagcattatatcagcaacagcaactgccacagtcacagcagcaacagcaatcatcttccagccatcggcgcagcactagtagggatcttgatcaacaatttgcaaacatctctttgaaacataaagacggttcaggccaacttcacatgtgactctgactgtagctaggacgtaaatcacatcttcctgactctccctcagctgatttttcctggcgagtgacaaaaactacactgggtttttattgtgcatggtcaagaagagctcttgtcgtccttgtgctctctctcagaagttctgcctccacgttctgccagtgattctaatttctatcatagtatgtatccc

SEQ ID NO: 904 - DNA, 339 bp, Nicotiana tabacum
cgggtcgatgatcatcaggttgtgcccgcaggccatttcccgatactgccagcccggactgcgtttggcccgcgcaccgtgcaacgggtaccccatgagatcggtgggcgggtcagtggccagcacataggtgcgccccatcgccacgttgcccagctggccgagccgcaaaggctcaagccagctgcgcagcgggtgcgatcgcagccggcgctgcaaccaggcaaccgcattttccccggtcacacccgtcgcctcgaccggataaggcggcaaccaaccgtcagcgtcggccatttcggcgatcgcctgacgtcgccccacagcggctgtgtcact

SEQ ID NO: 905 - DNA, 340 bp, Nicotiana tabacum
cgggtggcccattctttaaccctcttggatttggaaaagatgaaaaatctatgaaggatttgaagcttaaggaggttaagaatggaagattggctatgttggcaattttgggctatttattcaaggtttggttactggtgttggaccttaccaaaaccttcttgatcatttggctgatcccgtaaacaacaacatcttgaccaacttcaagttccactaagtgaacttgtagttatttcttcccaacttactcttctcttatgtgtaacactatgtgcagatactattttgtatgtcatctgtaatgctaaaaaggggacatttggtctaaaaagcctga

SEQ ID NO: 906 - DNA, 142 bp, Nicotiana tabacum
aggcagtaattgggactcgcccggggctcgccctggtagcggagcactcgtaaaacgccccgggacttatgtgtggggcttagttccgtgagacttacacctcggcagtcgggacttacgccccggacacccccgccgccca

SEQ ID NO: 907 - DNA, 261 bp, Nicotiana tabacum
gcaacaaatcaaatactcatgttcaacagagagttacaaactcataacatttaaccaaaccatgcgtttaagttcggaatgaaactgaaagtattgagataagataaaatgaaactttgcaattacttgactgcttctttcaaaattcaaacaaggatggacctctgaccggggccaggaccgttaaacgaaaactcatcggcgataacgacagtacctcgacttgtagctgaatggagtcccggacaccccctccgccca

SEQ ID NO: 908 - DNA, 659 bp, Nicotiana tabacum
cggctcgaatttaagaaacagtatgaggtctgtcaggatgccatggttcctgacctgttgatttttccaccaaggactgacctgcatgatcatcctttggtgaaaaatggaagtgtgtttttgcagggtaaggcgagttccatggttgcagttgctcttgggcctaaacccggatgggaggtcattgatgcatgtgcagcaccagggaacaaaactgttcatcttgctgctctaatgaagggaaaaggaaagattattgcttgtgaacttaatatagaaagggttaaacgtctgaaagacactgttaaactggctggaccaactagtatccttttagcagctttctaacgtgaaagtcaagcatgaggacttcttaaacttgagtcctgaggatccagcatactcaaaggttcaagcaatacttttagatccatcatgttctggatctgggacagttgttgatagattagatcatctgctcccctcatatactgcagattcctctgatgtacatagacaagaaagctcgctgctttccagaaaaggctttggaacatgcattatcttttccagctgttgagagagtgtttacagcacatgttctattaaccaagtgagaatgaagatgtaatcaactctgttctgcctctgcttcttct

SEQ ID NO: 909 - DNA, 285 bp, Nicotiana tabacum
cgggacagtcgggagcaatgtgtggctgaggtcaagctgagcgggagtgtagacaccggcaatcgggttgatgaacgcgaggtagcggcaggtttaccgacagcagaaggagtggtacaaggtctgagcaatgacgggaccttgcgaggcgtgaccagcagcactcgcgcgcgaacgccgacgccaagggtggtgcagagttggcgagtcggtcagggacaaagtcgaaacacgtctgataagaagtagaaattgtaggctgcaaaacgtttgtttccattcaaa

SEQ ID NO: 910 - DNA, 586 bp, Nicotiana tabacum
cggcttgctaatatcggagatcaagaagaaaacgcttgtcccacagcagtggtgcaaccccgcagtgatctcgacaaaggtatagcagtctacttcaaacctaaagagcccaaacatcagcagattgtggagtcttcttcgttaaacatcaatttctattttgatagtaataagtgtgctaacctaacagtgtggaaggtagacaactaccctatacctcgaaagtacagcacaataagcacaggtgcaaagttgggaaatcccctggatgtgaatagctggtttcaaattaagcctcttggtggctcgacgtataagctagtgttctgtccctacggagaggagtttacttgccaaaatgtaggcatcactgaggaaaatggatataggcgtttggttctcacagagaatgcaaaggcctttgtgttcataaagcatggcggattaggaaaggccgaagcatgattatgcatctgctttctaataaaactaagttgtgtaaaacatgtattaatgcaggccctgcatccgtgtctcactggatgtaagaataaataatgtaatgcagccctaataagtgcccaaa

SEQ ID NO: 911 - DNA, 202 bp, Nicotiana tabacum
cttcatgctccactgcacagaataaaattactttgtactatagtaattagctctgttttaaaaggcagaattgggactcgcccggggctcgccctggagcggagcactcgtaaaacgccccgggacttatgtgtggggcttagttccgtgagacttacacctcggcagtcgggacttacgccccggacacccccgccgccca

SEQ ID NO: 912 - DNA, 557 bp, Nicotiana tabacum
cggggaaaatattgtacacacaatgaagggaacatctggggataaatttgagttcaaggcccctcggagtgggatgtacaagttctgttttaagaatccttattcaacaccagaaactgtctctttctacatacatattggacacatccccaatgagcatgaccttgctaaagatgaacatttggaccccattaatgtcaaaattgctgaactaagagaggcattggagtcagttacttcagagcagaagtacctaagagcacgtgatgctcgtcatcgtcatactaatgagagcacaaggaagcgtgttatattttacacaattggagaatatctgctgcttatattggctagtgggcttcaggttgtgtatatccgacaactgtttagcaagtcagttggctataaccgggtttgacaaatttaggttgtagcatagtgttttttcacctctgttctacaggaacttgagttgttttggtcagttgagggaagggcatccctctgtagcatcttttcttaagttattatttgaaaggatttgatccattctcaaa

SEQ ID NO: 913 - DNA, 368 bp, Nicotiana tabacum
cggcacataccccaacgcgcgcttcttcaagctcgacgttgacgaggtccccgacgtcgcacaagaactcggcatccgcgccatgcccaccttcctcctcttcaagaacggcgagaaggtcgccgaggtcgttggcgccaaccccaaggctctcgaggccgccatcaagtccaacatcgatgcatagagtgcgcgcgcatcacgcacgttcaagcgatcacattcggcaacctagcattgggaaacgaggaagggatggacacaaaaggaggcatttttaggtgcacatgacgccctgccagacatggaagggatacactgtagcacagatatcatgataccctgctaaatgacacgattcacataaa

SEQ ID NO: 914 - DNA, 438 bp, Nicotiana tabacum
  misc_feature (355)..(355): n = a, t, c, or g
cgggacggtcaatggtgccgagcgacaacaagacgtgacgatgagcagagtcaatcccgtgcctaccacagggagccggttgatgcaggggacaatcgcttcaaggtcaagatgcggcacagtcgatgcctcctccatcaaccacgtcagtcccggctgcgtcgcatgggacagtcaggtttcctgggcagcagggtgggctggacgatgcgatgtggtctctcccacttcgatccgaggatgagcgatgatcaagccgcccagcttgccggtagtaccgacgatccactcgcaaaaagatagcattccctctcgctgttcctgatgctccaccaaggctcgggccagcttgtcnagcacgggatcagctgccgggtcggatgacgtcgaaacgctctgcccaccgcagagatctcgaagtgaaagacactgtcaaaa

SEQ ID NO: 915 - DNA, 255 bp, Nicotiana tabacum
cggggatgacttatgcattgcaagtggaacacctaacaatggcacatttgatccagggtttcaattacagaactccaactgatgagcccttggatatgaaagaaggtgcaggcataactatacgtaaggtaaatcctgtgaaagtgataattacgcctcgcttggcacctgagctttattaaaatctaagatgtatcatcttggttgatcattgtttaatactcctagatgggtatacatctaccttttttcaaa

SEQ ID NO: 916 - DNA, 459 bp, Nicotiana tabacum
cgggtacgtaacagtccacctgaatgggaagcctcgagtacttacattgaagcaggatttacattactggccaacatgggagctgaggtttgatccaggaactgctatgtggcgacgcaaaacaatcaaagctttggactctggtgttttgtgaacttacttggctgattaggttttcctgtggggatgtgcaaaattggggaacgtgtagaaagttcaccggctgcgttggtagttactctaacttattggagttgaaagtcgccatacatcaatatatgcaaaatcatataaagcaggtatctggctttatatactatttgttgtaaatgaccatttatcagatgaaattaataagtggtagaattttagacaagttataagtgctagcgctatacatgtctttgtgaatcagagtatgtaaaccatgaactaggaggggactttttgccaccaaaa

SEQ ID NO: 917 - DNA, 484 bp, Nicotiana tabacum
  misc_feature (448)..(448): n = a, t, c, or g
  misc_feature (481)..(481): n = a, t, c, or g
cggggtgatgggtctgggcaagaagatcatcaaccagaacagcggggctgcggaaaaagtcaagcagaccaagaccagcccggcggacgtcgtttcctggtccggctgcaaagatgatcagaccagcgctgacacacaaatcgcctcgcaagcgatcaggcgcaatgtcatacgctttcatctcggctctgaaccagatacccgcagcatagctaccagcagttgctggtcacgattccgggatgatgctaaaggggataatacagccagataacctcaactcagcgcgatgtcaccctatggacactcagctcttgtttatctgctagatacggctgtcgctcagatgtttaatcatcgaactcgaagataatttgtatcatacctatggaagtcggtcgcgcttgtaatggtcgtcaactttgttgttcttggctgctttcatganggctgtcgacgatacttgcatgaccgagggganaaa

SEQ ID NO: 918 - DNA, 219 bp, Nicotiana tabacum
cgggcaaacatggtgtgtggcgagtggtgaagcggggaaggataatctacaagcagctctagatttcgcttgtggtgagggtggagctgattgccgttcgattcagccagggtccacgtgttacaatcctaacacgctggaagctcatgcatcatacgctttcaacagctattatcagaagaaagggcgtgcgatgggttcgtgttattttggtgggga

SEQ ID NO: 919 - DNA, 510 bp, Nicotiana tabacum
  misc_feature (124)..(124): n = a, t, c, or g
  misc_feature (283)..(283): n = a, t, c, or g
ccgggacggtcaatggtgccgagcgacaacaagacgtgacgatgagcagagtcaatcccgtgcctaccacagggagccggttgatgcaggggacaatcgctatcaaggtcaagatgcggcacanacgatgcctcctccatcaaccacgtcagtcccggctgcgtcgcatgggacagtcaggtttcctgggcagcagggtgggctggacgagcgagtggtctctcccacttcgaccgaggatgagcgagatcaagccgcccagcttgccggtagtaccgacganccactcgcaaaaagaagcattccctctcgctgttcctgagctccaccaaggctcgggccagcttgtcgagcacgggatcagctgccgggtcggagacgtcgaaacgctctgccaccgcagagatctcgaagtcgaaagacactgtcaaaactcgtgtgaccagtaatcccgttagaggagcgacatatatggcatccgatatgaaacgctcgcaaaccactgtgaaa

SEQ ID NO: 920 - DNA, 332 bp, Nicotiana tabacum
actgatcaaagcactaaatacctcaaatgcttttgcaatctcatcaagtgttcaagaaattaatactaaaaaaataagccaaaaaggaaaagaacaaaatgttttacatatccactggcacacgtccatacaagtgtgcaggcaatcttggagtaggaatagcttgtattggatttttcatgtaagttactgttccagggctctcctccaagtcaatattctccgggttaacccccgggggcggagcccacgtaaaatgatgcaacaaatgacccaacatagatgtgaccaagttgatagcaagttgtgcacccggacacccccgccgccca

SEQ ID NO: 921 - DNA, 263 bp, Nicotiana tabacum
cacaagcaccactctttgatgcaagtaaaatccccccctttttttttttcttcaattaataaagtgggcacaacaaacgtggactaggcacagccacgagtcgattagctcttggagcagtgagtccaaaaatatcatccattttaagctcacttggtttcataccatctggcaattcccaagtaaagcaaagaagaagatgggccactgccatttctaatgcataaagcccaagttgcatacccgggcaccccctccgccca

SEQ ID NO: 922 - DNA, 556 bp, Nicotiana tabacum
cgggccgatgcgtccagcgccgacaagaagacgaccaaacacgaaaagagaagcttgggaggtttcggttcaggactaggactttccggtctcggctacagctccggtctcagccacggctccagtcttggctacagctcgggtctcagctacggctccggtcttggctacagctccggtttgggatacggttccggtctgagctccggctacggtccgggatacggttccggttcgagctatggttccggcctgagctccggctacggtctgggatacggttccggttcgagctacggctccggcctgagctccggctacggtcttggctacggttccggttcgagcttcggttctggtctaggatactccgctgccgctgctgctcccgcaccgacaaccggccccatcgctccaatctccaaggaagtgcacatcatcaaccgacatgcccaacctgtgtccgccccgtacccagtgccagtaactcacgacgtgccgttcccgtgccacatgcagtgcctacccagtcgacaaaccataccagtcaatgtac

SEQ ID NO: 923 - DNA, 234 bp, Nicotiana tabacum
ctattagtagcatccaagtatgtgacctaaaggtcgatgaagtaggtgcaaaccatgaagaattgaaaatcatagtagaaaccccatcagagacaaagcactaggcttcacatctgcctaagtctcggtgggcaaagttacacaacacctgttctagtcgaggtagcaaggtagcagatacccggtgggaatagccgaggtgcgcacaagctgcccgggcacccccgcctccca

SEQ ID NO: 924 - DNA, 207 bp, Nicotiana tabacum
cgggactccattcagctacaagtcgaggtactgtcgttatcgccgatgagttttcgtttaacggtcctggccccggtcagaggtccatccttgtttgaattttgaaagaagcagtcaagtaattgcaaagtttcattttatcttatctcaatactttcagtttcattccgaacttaaacgcatggtttggttaaatgttatgagtta

SEQ ID NO: 925 - DNA, 551 bp, Nicotiana tabacum
catcactcgtaagttctctttgttcatagtaatgtatctgatatcaattgaaaagttgtgacttaaaaatatagcagtggtggtgttttgatactctttggttgtgctgtgatcacttccctgcttcagtcggtgttttggtagtcatctggtcaactgcatgcacagtgttctgaagttcttcccatatggctttgtagaccatcctctgcctattcacagcagattgtccctcaaaagctgaagagactacatcaatgctgacatgccgaccatcaccataagcatctttaactacaactatgtccgcattcaactgctccttgatctttttctgcatagactccataagaggagaatcaattgagccagtatcgctagtcgcacgagtagagaaagtccgacgaccagcgaaaagctcaatctttgaacctatttggggaacgagcttcattggcctgtaggaacgagcagaaatagaaacgcatttgagtaatgaaggtacacgtggctgacggagctgctcaatcgccggacacccccgccgccca

SEQ ID NO: 926 - DNA, 256 bp, Nicotiana tabacum
cggccaattggagtagcgttgcacacagccatagcagagatgtatctgaatgattaccaacgttccattgcgatttagatatatttacactgtcgttagttggtctctcgagtcgtataaatgttccaatcactactcatacattctgcgcattgtatatattgcaacgataaacaagcaaggtcatgtggttccttttctttttcttgtttgccatggtgactcttgcgctctttaaagtttctcttatgcaaaa

SEQ ID NO: 927 - DNA, 448 bp, Nicotiana tabacum
cggcccgagaacgaacgatttcatattttttggtttttttgcttactgttcgaaacgcgcaaatttatatcaatattcatgatattaatttatcggtggtccagaggaaatcgttaagagtgacgcactgccagtttgtggattttcaccgagtcaaaaccgtctgaagaggactcctcgcgtacataacaatactataggtgaagtcttttcgactcgtttcgtattcatcgcgtcatgatgccggtaaggctgcagtgggtccgacttttaagccgctgtcacttgcggcggacgtgcgtcccgttgacctacatcgctccgagtcaaccggtccgacatcgcaccgagtctaaggtggtccgttcgccgttttcggacgttcagatccccgaatgtttgatcgacgaattgtgtggagcgacctggagaggtggccggacacccc

SEQ ID NO: 928 - DNA, 439 bp, Nicotiana tabacum
ttttacaacttaatcgcacttgagcaacaacaagaaagcttgctggtacttttacttgtataacatatccattatagaaatagttttagatccaaggctatccactgtgaatgaggggattgaattactccacatggaacgatagaaagattcacacggattgagaagcaagagaacaaaaacaaaagtataacggaaactgtaagaagtcaaagtgcactctgtttcatccatgtcattcatcaaactcatgcatatgatccaagagatagtttgcagccagctcctcatttttgttgcatgcaaaaaatacttgcaaaaccaaagctcgatcgaaacccatagcttcaagtcgttcgatagcctcgcgctcttccggtgtgacagtcacagcttgtggtatcgcccctgctggctgcccgggcacccccgccgccca

SEQ ID NO: 929 - DNA, 297 bp, Nicotiana tabacum
cggcgaatggaattgaagtacaactagagatgtggaatgacaaccaaacaagaccgcagtttgacaaagctaatattggtgggtggaaagtactagggtcttcagctacggacaaagatggtcgaagtggtcagttgatgaatatggttgaagctttggctccaggaatatatcggataagtttcaacacgggtgagtatattcctgatggattttttccctatgtctctattgtttttgagatcagagagtcccagaaatgggatcactttcatgttcctttgctgctctctccaa

SEQ ID NO: 930 - DNA, 552 bp, Nicotiana tabacum
  misc_feature (104)..(104)
  misc_feature (104)..(104): n = a, t, c, or g
cggggatgatcgccgaaaagtgcaagatgggaatcatgcccgggcacatctttaccgagggaaagatcggaatcgtctctagatccggaaccctgacttacganggccgtcaaccaaaccaccctcgccggtctcggacagaccttgaccgtcggtatcggtggtgaccccttccccggtacccaacacatcgacgtcgtcaaggtcctccttgaagaccccaagactcagggtatcgtcctgatcggagaaatcggtggaaccatggaggaagaggccgctgcctacctcgagcagttcaacaagacccgatcgaaccccaagcccgtcgtctcgttcattgctggtgccaccgctcctcctggcaggaggatgggtcacgccggtgccatcatctcgggaggcaagggaaccgcttcggccaaggtcgaggccctggaaaaggccggcgccaagatcgccacctctcccgctcagatcggtgacttgatgttgaaggcgatgaagagctggtctcgcatagatgcaggaatgagtaacggcagaggcgta

SEQ ID NO: 931 - DNA, 336 bp, Nicotiana tabacum
tgcgcatcacttggcatttttgcggacaaacaccaagaatcagttatattaggttgaaggaactaaaagtttaaagcaacaaatcaaatactcatgttcaacagagagttacaaactcataacatttaactaaaccatgcgtttaagttcggaatgaaactgaaagtattgagataagataaaatgaaactttgcaattacttgactgcttctttcaaaattcaaacaaggatggacctctgaccggggccaggaccgttaaacgaaaactcatcggcgataacgacagtacctcgacttgtagctgaatggagtcccggacaccccctccgccca

SEQ ID NO: 932 - DNA, 339 bp, Nicotiana tabacum
  misc_feature (165)..(165): n = a, t, c, or g
  misc_feature (298)..(298): n = a, t, c, or g
cggagggggtgcccggcggaaccttggatcgtgagactctgaaggcgtttttcgctgtcagtggcgaacctggtagctttacgcacagccccggccaagaacgtattcctctaaattggtaccgtcgccctacgacttctcaatacaacgtcgtcgaggtagtcncacgacctccacgatcagcaacgctgcctacccgggtatccttcgcgtcggagggaacacaggaaccaccgacagcttcaccggcgtcgatctgcaggatttggacgggtggcgtgttcaactcagcgacgcncttcgatggcaacaatgcagcgtgcttcttgtaccaggcaa

SEQ ID NO: 933 - DNA, 184 bp, Nicotiana tabacum
cgggtgtggaccgctgacattatacccgaggagctcatgccatttactgaggaatgaagctatactcgtaagtggtgcatctcgtgctttatcagttctgtcaatggcgaaagccggtctcgtaattgtgccttcttctcttcctctacagcggtttcatggtgccggacaccccctcctccca

SEQ ID NO: 934 - DNA, 180 bp, Nicotiana tabacum
gtctcaactcaagttcctgctgcaataaacatatgaggtaaattcaacaaacaggaaaggcctgttcatgctactctgaacacagacccagcatatacttggaatctataaatacaagttaggtagctgacgcgcactatactcgcactccaaagcattcccggacaccccctccgccca

SEQ ID NO: 935 - DNA, 521 bp, Nicotiana tabacum
  misc_feature (415)..(415): n = a, t, c, or g
accccattcgtacgtaatggaacagcctcatctatattgtaaccacttgtccaagtaacagtcattatatcccatgatttcccaagagtaagacgcggataaaggggtgctttcggattggcaaatgcaatgtaatttgagatggctatcaacttgggatttgacaaacccccagatgaataaggcaaatgatgaaatccccacgctggttaattatccggaaattcagtgaagttttccctgtctttgtgtacttgtcattgctgtaatttgcaaatttgaactttaagggggcagtacagataaatggatgctccagattgttgttctttgatggtttgtgggggacaaatggattcactttgatgataactgggcttttgatttccttgaaggaccaccaccattaaacgancatcactggacggccagcatcaacaaaataaccaatcgcggagttcactccaaatagtatcacccaattccattaacgccgccgacccgggcacccccgccgccca

SEQ ID NO: 936 - DNA, 227 bp, Nicotiana tabacum
cgggactccattcagctacaagtcgaggtactgtcgttatcgccgatgagttttcgtttaacggtcctggccccggtcagaggtccatccttgtttgaattttgaaagatagcagtcaagtaattgcaaagtttcattttatcttatctcaatactttcagtttcattccgaacttaaacgcatggtttggttaaatgttatgatgtttgtaactctctgttgaaaa

SEQ ID NO: 937 - DNA, 284 bp, Nicotiana tabacum
cggggacgggcgagtataaatgatagcaagggcaaaagcagacactggcttgcggaaaccttgctgtgcttgctgcaattgtcctgtagaatttgtggaccagagctttatggatggacagcactacaagctctttagtattgaaaccagagtagcgcagctggacgtgacaatggcccactatcgacatcacgcactggatctccgactgttcaccggccttaaatcaaatgtgatgtcttactggacaactgaaaatacatgctcctaacgcttctgcaaaa

SEQ ID NO: 938 - DNA, 215 bp, Nicotiana tabacum
gtctgggaatgctttggagtgcgagtatagtgcgcgtcagctacctaacttgtatttatagattccaagtatatgctgggtctgtgttcagagtagcatgaacaggcctttcctgtttgttgaatttacctcatatgtttattgcagcaggaacttgagttgagacattagagattgctggtatatatttttaagagcttgctcgttttgcaaaa

SEQ ID NO: 939 - DNA, 487 bp, Nicotiana tabacum
gctgagaggggaagtggtggtggcactgagatgagaagaaggaacgaagagaactctgttagggtcaccaacctttctgaggacactcgggaggctgacttgttggagctgttccgtccctttggtcacgtcagccgagtgtatgtcgccattgatcaaaagactggaatgagcagaggatttggttttgtcaactttgtcaacagagaagatgctgagagggccataaacaagctgaatggttatggttatgacaatctcatccttagagttgaatgggctgctcctagaactaattagctttctttcctaggccaatactgtgttgttcccaaaaactgttgttgggaaccataattttgcttcctgtatgttgtgtttaagaatgtcactcctgcctcatttattggaggaacaaaagagaacgttgtttccttgattatttgttcttcaaaactgtggtatggtcattctgtctagtgcataa

SEQ ID NO: 940 - DNA, 454 bp, Nicotiana tabacum
gcggtcgtggtcgctctggaggctctgatttgaagtgctacgagtgtggcgagcccggtcattttgctcgtgagtgcagattgagtggagctcctggaagacgtagaagtcggagccctcctagatatcgaaggagcccaagttatggtcgtaggagttatagtcctcatgggcgttccccccagcgccgaagcttgtcaccgcgcggtcgcagctatagccgatctccatatcgcggccaagataaagttccatatgctaatggaaatgggctcagagagcgccgcagaagccgaagctgaatgggagagatgattgcctgtcttgtccaggagttttcgattagtgtgttactgtccttgacttaatcacagctgtgtaagtggggccacaccctctgcttaaactggtagcttttgctaaatttcagttattgctttgacatgatacgtga

SEQ ID NO: 941 - DNA, 254 bp, Nicotiana tabacum
gtctgggaatgctttggagtgcgagtatagtgcgcgtcagctacctaacttgtatttatagattccaagtatatgctgggtctgtgttcagagtagcatgaacaggcctttcctgtttgttgaatttacctcatatgtttattgcagcaggaacttgagttgagacattagagattgctggtatatatttttaagagcttgcttgttttgtacatgtttcttttagagtaggaccttaccgttgatttccctta

SEQ ID NO: 942 - DNA, 237 bp, Nicotiana tabacum
tttggggggggggggcgggggtgtctgggaatgctttggagtgcgagtatagtgcgcgtcagctacctaacttgtatttatagattccaagtatatgctgggtctgtgttcagagtagcatgaacaggcctttcctgtttgttgaatttacctcatatgtttattgcagcaggaacttgagttgagacattagagattgctggtatatatttttaagagcttgctcgttttgctaaa

SEQ ID NO: 943 - DNA, 457 bp, Nicotiana tabacum
  misc_feature (427)..(427): n = a, t, c, or g
gctgcgcaaaacgttagggcaacatatcatatatataacccgcagaatgttgggtgggatttgtatgcagttagtgcgtactgctcaacttgggatggtaacaagcctttggcatggaggaggaagtatggttggactgcattttgtggccctgttggacctcgtggccgatgactcttgtggcaaatgcttaagggtgacaaatacaggcacaggatgctcagaccacagtgagaatcgtggatcaatgcagcaatggcggactagacttggacgttaacgttttccggcagctcgacacagacggaagatgggaatcaacgtggccaccttattgtgaactacgagtttgttaattgtggtgacaatatgaatgttctggtatccccagttgacaaggaataagaagctatatatggccatgttnagtcttggaccggcccaaataaaagtaaaa

SEQ ID NO: 944 - DNA, 262 bp, Nicotiana tabacum
gtcaacggcggtggttgcggcggcggttgtggtggatgtggaggttagtgttgatttggacactagccacccatctagttagcatggcttttaattttcctcttcttgttgttttctttcctttttcgtttcttcttatcctttttgttgttttaaatttttttatttgtatgttgtttcgaattgggaatggacttccaaaaggtgtgtaaatgaaattatgaatgattgcatgtatgatagaatgagtccatagcgaaaa

SEQ ID NO: 945 - DNA, 513 bp, Nicotiana tabacum
gctgcgcaaaacgttagggcaacatatcatatatataacccgcagaatgttgggtgggatttgtatgcagttagtgcgtactgctcaacttgggatggtaacaagcctttggcatggaggaggaagtatggttggactgcattttgtggccctgttggacctcgtggccgagactcttgtggcaaatgcttaagggtgacaaatacaggcacaggatgctcagaccacagtgagaatcgtggatcaatgcagcaatggcggactagacttggacgttaacgttttccggcagctcgacacagacggaagatgggaatcaacgtggccaccttattgtgaactacgatgtttgttaattgtggtgacaatatgaatgttctggtatccccagttgacaaggaataagaagctatatatggccatgtttagtctttgacggcccaaataaaagtaaaaagaacgatatgtaaaaggaaaaagaaaataaagttgctttgatggggttaggcaatt

SEQ ID NO: 946 - DNA, 325 bp, Nicotiana tabacum
  misc_feature (209)..(209): n = a, t, c, or g
gctgcagttgctgttgctgctcccgctggtggtggtgctggtgctgcagcagctgcccctgctgcagaggaaaagaaggaagatgcccaaggaagaaagtgatgacgacatggggttcagtctgtttgactaggagctcctttcagtatgatatttggttccttttagatgaattgatgaaacttggtaatagcaccctttataaggangatttttgatctgtttgtcacaattaaatgtaatcttgaggttatgatttatgaacatctgtcatgtcagtaattgctacttattgtcgactccaaaaaaaaaaaaaaaaaaaaaa

SEQ ID NO: 947 - DNA, 216 bp, Nicotiana tabacum
gtctgggaatgctttggagtgcgagtatagtgcgcgtcagctacctaacttgtatttatagattccaagtatatgctgggtctgtgttcagagtagcatgaacaggcctttcctgtttgttgaatttacctcatatgtttattgcagcaggaacttgagttgagacattagagattgctggtatatatttttaagatgcttgctcgttttgcaaaa

SEQ ID NO: 948 - DNA, 250 bp, Nicotiana tabacum
gctgcagttgctgttgctgctcccgctggtggtggtgctggtgctgcagcagctgcccctgctgcagaggaaaagaaggaagagcccaaggaagaaagtgatgacgacatggggttcagtctgtttgactaggagctcctttcagtatgatatttggttcctttttagatgaattgatgaaacttggtaatagcaccctttataaggagatttttgatctgtttgtcacaattaaatgtaatcttgagga

SEQ ID NO: 949 - DNA, 198 bp, Nicotiana tabacum
gtggcggacgcggtggaggatactgccgctatggttgttgcggccgccggaattattatggttgcagcaggtgctgctcctacaaaggtgaggccatccatggataaggtcactgaagctttgtactcgcaagatgtaatagtaataatcttgcagctttagagcttgttgtaacaagttatgaataaaattaagtca

SEQ ID NO: 950 - DNA, 509 bp, Nicotiana tabacum
gcgcaaaacgttagggcaacatatcatatatataacccgcagaatgttgggtgggatttgtatgcagttagtgcgtactgctcaacttgggatggtaacaagcctttggcatggaggaggaagtatggttggactgcattttgtggccctgttggacctcatggccgagactcttgtggcaaatgcttaagggtgacaaatacaggcacaggagctcagaccacagtgagaatcgtggatcaatgcagcaatggcggactagacttggacgttaatgttttccggcagctcgacacagacggaagagggaatcaacgcggccatcttattgtgaactacgagtttgttaattgtggtgacaatatgaatgttctgctatccccagttgacaaagaataagaagccatcgatgcccatgttttagtcttttgacggcccaaataaaagtaaaaagaacgatatgtaaaaggaaaaagaaaataaaagttgctttgaaggggttaggcaat

SEQ ID NO: 951 - DNA, 302 bp, Nicotiana tabacum
gctgcagttgctgttgctgctcccgctggtggtggtgctggtgctgcagcagctgcccctgctgcagaggaaaagaaggaagagcccaaggaagaaagtgatgacgacatggggttcagtctgtttgactaggagctcctttcagtatgatatttggttcctttttagagaattgatgaaacttggtaatagcaccctttataaggagattttcgatctgtttgtcacaattaaatgtaatcttgaggttatgattatgaacatctgtatgtcagtaattgctacttatggtcactccaaaa

SEQ ID NO: 952 - DNA, 309 bp, Nicotiana tabacum
  misc_feature (210)..(210): n = a, t, c, or g
  misc_feature (250)..(250): n = a, t, c, or g
gctgcagttgctgttgctgctcccgctggtggtggtgctggtgctgcagcagctgcccctgctgcagaggaaaagaaggaagagcccaaggaagaaagtgatgacgacatggggttcagtctgtttgactaggatgctcctttcagtatgatatttggttcctttttagatgaattgatgaaacttggtaatagcaccctttataaggangatttttgatctgtttgtcacaattaaatgtaatcttganggttatgatttatgaacatctgtcatgtcagtaattgctatcttattgtcgactcaaaa

SEQ ID NO: 953 - DNA, 318 bp, Nicotiana tabacum
  misc_feature (86)..(86): n = a, t, c, or g
  misc_feature (100)..(100): n = a, t, c, or g
  misc_feature (117)..(117): n = a, t, c, or g
gctgcagttgctgttgctgctcccactggtggtgccggtgccggtgctgcagctgctgcccctgctgcggaggataaagatagganagatgcccaagganagataagtgatgacgancatgggattcagtctgtttgattaggatgctcctttcagtatgatatttggttcttttttagatgaattgatgaaacttggtaatagcacccttgttaaggatgatttttgatctgtttgtcacagttaaatgtaatcttgaggttacgatttatgaacatctgttatgtcagtaattgttacttattgctgtctccaaaa

SEQ ID NO: 954 - DNA, 236 bp, Nicotiana tabacum
gctggttatgattctggccctggcgctggttatggtggaccaggaggtttatacggaagtagggcaggctatagtggcagcggccgttaccatccctatgccaggtagattatcttaagcatttcctaggagttgcattcaggctcttggtaatgatctttggctcagagttgagtagatatgggatcgctagcaagcagacaacatctagaagattggcagaaccctagtttgta

SEQ ID NO: 955 - DNA, 285 bp, Nicotiana tabacum
gtggggctaaaatcctttatggcaagggtgcatttgatcgccacttttcacagaatagaccaaaggattctgagacaaacctggaggggtctgacggagaccacgagacggaacaagagcttccttccattgttgctttgtaaatgttctgtgaggtgtatttctggtctcaactatgtacagtaatctaaattcaaataaacagtgttaatttaataagctcaatgtgctttcatactgcatttttgttgtgttttactgttatcttgctatttattcttaaaa

SEQ ID NO: 956 - DNA, 308 bp, Nicotiana tabacum
agcaattactgacatgacagtatgttcataaatcataacctcaagattacatttaattgtgacaaacagatcaaaagtctccttataaagggtgctattaccaagtttcatcaattctctaaaaaggaaccaaatatcatactgaaaggagctcctagtcaaacagactgaaccccatgtcgtcatcactttcttccttgggctcttccttcttttcctctgcagcaggggcagctgctgcagcaccagcaccaccaccagcgggagcagcaacagcaactgcagcacccccgcccccccccccgaaa

SEQ ID NO: 957 - DNA, 238 bp, Nicotiana tabacum
gtggaggaccagtggtggtggacgtggaggtggcggaccggtggaggatactgccgctatggttgctgcggccgccggaatatatggttgctgcggccgccggaatatatggttgcagcaggtgctgctcctacaaaggtgaggccatccatggataaggtcactgaagcttgtactgtaagatgtaatagtataatattctgcagttttagagcttgtgtaacaagtatgaataaaa

SEQ ID NO: 958 - DNA, 258 bp, Nicotiana tabacum
ttttttttttttttttttttttttacaaaacgagcaagctcttaaaaatatataccagcaatctctaatgtctcaactcaagttcctgctgcaataaacatatgaggtaaattcaacaaacaggaaaggcctgttcatgctactctgaacacagacccagcatatacttggaatctataaatacaagttaggtatgctgacgcgcactatactcgcactccaaagcattcccagacacccccgcccccccccccgaaa

SEQ ID NO: 959 - DNA, 397 bp, Nicotiana tabacum
gccgttgtggcgatgcggtagagtatggcaggagttgggacggagaataatagaggaagatgaataggtggttgcacagtggtaagcaacgactatggtggaaatagaaaggaggaaggaggagataggagaaataattggaaaaacagaagataatgcctctcacgcgcctcaacagtggggtgttacatacattatgctatgtcagcaatttgtgtctaattgacacaatttgcattcacttcaagtgttcaataggcactattattagttgaagtgtttgagtgaaaaatattgcccaagtttatggggccgcctatgtattctgtctttaattaaagtactgaaatatattgtaaattattagaggaaattagtaaaagattgaaatttcata

SEQ ID NO: 960 - DNA, 249 bp, Nicotiana tabacum
gctgcagttgctgttgctgctcccgctggtggtggtgctggtgctgcagcagctgcccctgctgcagaggaaaagaaggaagagcccaaggaagaaagtgatgacgacatggggttcagtctgtttgactaggagctcctttcagtatgatatttggttcctttttagagaattgatgaaacttgtaatagcaccctttataaggagatttttgatctgtttgtcacaattaaatgtaatcttgaggta

SEQ ID NO: 961 - DNA, 632 bp, Nicotiana tabacum
taggagtactcaatgaagaattatacatagatctccataacacaaggggacatgtctacatcacaaatgtgacgctacagccgaatggagaaacagcactacaatgttctaaaggatgataagtagccaattatatcagattattacagacacggcttgccagtttatttgacagagaagcctagaccacaaccctaaggtacataagtgatttagcgatactgaggagccagttccccatccttgacaatgtaattttgtgctgggaaatcctcgcccttgaagtacctgtccagcatatccttcgttccagcagcataccgcaactgtgcatcaatggtagtccctgaaatgtggggggtcatagcttggtttggcatgtagcgccacggatggtccttgggagctggttgtgggtaccaaacatctccactgtatcctgcaatatgaccactattacaagcatcaacaactgcttgagtgtccatgattgctcctcgagcattgtttacaattagaacgcccttcttcatttttgcaattctttccttgtcaaacatcccttttgttttctctgtaagaggtgtattgacgaccactatgtcacattttgaaagcatcttatcaagatc

SEQ ID NO: 962 - DNA, 222 bp, Nicotiana tabacum
aaagggtgctattaccaagtttcatcaattctctaaaaaggaaccaaatatcatactgaaaggagctcctagtcaaacagactgaaccccatgtcgtcatcactttcttccttgggctcttccttcttttcctctgcagcaggggcagctgctgcagcaccagcaccaccaccagcgggagcagcaacagcaactgcagcacccccgcccccccccccgaaa

SEQ ID NO: 963 - DNA, 236 bp, Nicotiana tabacum
gtcaacggcggtggttgcggcggcggttgtggtggatgtggaggttagtgttgatttggacactagccacccatctagttagcatggcttttaattttcctcttcttgttgttttctttcctttttcgtttcttcttatcctttttgttgttttaaatttttttatttgtatgttgtttcgaattgggaatggacttccaaaaggtgtgtaaatgaaattatgaatgattgcatga

SEQ ID NO: 964 - DNA, 305 bp, Nicotiana tabacum
gctgcagttgctgttgctgctcccgctggtggtggtgctggtgctgcagcagctgcccctgctgcagaggaaaagaaggaagagcccaaggaagaaagtgatgacgacatggggttcagtctgtttgactaggagctcctttcagtatgatatttggttcctttttagagaattgatgaaacttggtaatagcaccctttataaggagatttttgatctgtttgtcacaattaaatgtaatcttgaggttatgatttatgaacatctgtcatgtcagtaattgctacttattgtcgactccaaaa

SEQ ID NO: 965 - DNA, 240 bp, Nicotiana tabacum
gtcaacggcggtggttgcggcggcggttgtggtggatgtggaggttagtgttgatttggacactagccacccatctagttagcatggcttttaattttcctcttcttgttgttttctttcctttttcgtttcttcttatcctttttgttgttttaaatttttttatttgtatgttgtttcgaattgggaatggacttccaaaaggtgtgtaaatgaaattatgaatgattgcatgtatga

SEQ ID NO: 966 - DNA, 574 bp, Nicotiana tabacum
gttagagccaatgcacaacagccaaagctttttgtcgggatgattttgattcttatttttgctgaagccctggctttgtatggccttattgttggaatcatcctctcttctcgtgctggtcagtctagatgcagagtagaagaagagaatgttgtgcaccattactgtgaattatctttgtttttttcatggataagctagtctggctgttgaattaaatttccttttatctctgggttgcaagattctgtacttgattgcttggttagaagaattggttcatatgtgcggttctgctatagattagatctctaaataaagaagtcggttaatctgatgccccaactttcaaggattcgggggggggggcgggggtgtctgggaatgctttggagtgcgagtatagtgcgcgtcagctacctaacttgtatttatagattccaagtatatgctgggtctgtgttcagagtagcatgaacaggcctttcctgtttgttgaatttacctcatatgtttattgcagcaggaacttgagttgagacattagagattgctggtatatatttttaagagc

SEQ ID NO: 967 - DNA, 176 bp, Nicotiana tabacum
gcaccccgtagctcaagcttctcttagattgatcttatctttattgtagctagttttatgcaattttgataatcacatgctggaattgacttgcagcagtcgaaagcacttggttcaattgggcataaacttctttattggatttttagagaactaattttgcatgtatagtaata

SEQ ID NO: 968 - DNA, 471 bp, Nicotiana tabacum
  misc_feature (218)..(218): n = a, t, c, or g
cagcaaatatatatggaaaggtagcctgagcagaaggaggaactgttgcgttgttaaaagcctgaacagaaagattttgaaccaaatagcgatgatcaaagggaaggtgaacactggcttggatggcaatgatattcagatttgatcccccatcatttttcattccaaccaacagctctctctcctcaccagctgccactactttagaagggttttangggaaaacacaaatcgtttcaatcccaggtgcaggactataactctcactgctaaaatcttggacatcctcaccaacaattccaagatcccctccttcctcggtaccctcaaccacttctgcttcagggtcggattgagctctagcaacttgaagaaatgatgaagagaagaggagaagagccaggacgatagaaaaccctaattgtcattttgagaggaaggcggagcacacccccgcccccccccccgaaa

SEQ ID NO: 969 - DNA, 434 bp, Nicotiana tabacum
tttaaagaataatattcgggttcaaattacccgcttttaggcctaatttcggacttagcccataataattcgagtccaccacacatgaggggacacgcgtggggaacacggacggaatcctgtacacggggaaccccaccacgcgtgggggacacaagtctcgaaccccaccacgtgtggggctcatttccctgggcaaaaccattacaaaggcacggtcaaaaacattttaaaagggggattttggaaaagtttttgctgggaactactgttcatctttcttctttaagaaagaaagaaaaacctactggaaaaaaaaaacgaacaaaccacccaagcaccaactccaccacccgtcaccttccccggcacccctacagtcgcaacccccccagtgccggaactccagctccctccgtcgttcaccatcctcg

SEQ ID NO: 970 - DNA, 231 bp, Nicotiana tabacum
gtggcggacgcggtggtggtggacgtggaggtggcggacgcggtggaggatactgccgctatggttgttgcggccgccggaattattatggttgcagcaggtgctgctcctacaaaggtgaggccatccatggataaggtcactgaagctttgtactcgcaagatgtaatagtaataatcttgcagctttagagcttgttgtaacaagttatgaataaaattaagtcatca

SEQ ID NO: 971 - DNA, 306 bp, Nicotiana tabacum
gctgcagttgctgttgctgctcccgctggtggtggtgctggtgctgcagcagctgcccctgctgcagaggaaaagaaggaagatgcccaaggaagaaagtgatgacgacatggggttcagtctgtttgactaggagctcctttcagtatgatatttggttcctttttagatgaattgatgaaacttggtaatagcaccctttataaggagatttttgatctgtttgtcacaattaaatgtaatcttgaggttatgatttatgaacatctgtcatgtcagtaattgctacttattgtcgactcaaaa

SEQ ID NO: 972 - DNA, 248 bp, Nicotiana tabacum
gtggcggacgcggtggaggatactgccgctatggttgttgcggccgccggaattattatggttgcagcaggtgctgctcctacaaaggtgaggccatccatggataaggtcactgaagctttgtactcgcaagatgtaatagtaataatcttgcagctttagagcttgttgtaacaagttatgaataaaattaagtcatcatttaatgtttgtgttagttatacaatggtgtgataatgttttcccta

SEQ ID NO: 973 - DNA, 242 bp, Nicotiana tabacum
gcggaggatactgccgctatggttgctgcggccgccggaattacaggtgctgctcctacaaaggtgaggccatccatggataaggtcactatattgaagctaagcctcacaacgtatcatcatgtggagcaatatataaaacctttgtactttgtaaagcctcaagatgtaatagtaatgatcttgcagctttttagagcttgttgtaacaagttatgaataaagttaagtcaacaacaaaa

SEQ ID NO: 974 - DNA, 462 bp, Nicotiana tabacum
gctgcgcaaaacgttagggcaacttatcatatatataacccgcagaatgttgggtgggatttgtatgcagttagtgcgtactgctcaacttggatggtaacaagcctttggcatggaggaggaagtatggttggactgcattttgtggccctgttggacctcgtggccgagactcttgtggcaaatgcttaagggtgacaaatacaggcacaggatgctcagaccacagtgagaatcgtggatcaatgcagcaatggcggactaggcttggacgttaacgttttccggcagctcgacacagacggaagatgggaatcaacgtggccaccttattgtgaactacgatgtttgttaattgtggtgacaatatgaatgttctggtatccccagttgacaaggaataagaagctatatatggccatgtttagtctttgacggcccaaataaaagtaaaaagaacga

SEQ ID NO: 975 - DNA, 216 bp, Nicotiana tabacum
gtctgggaatgctttggagtgcgtagtatagtgcgcgtcagctacctaacttgtatttatagattccaagtatatgctgggtctgtgttcagagtagcatgaacaggcctttcctgtttgttgaatttacctcatatgtttattgcagcaggaacttgagttgagacattagagattgctggtatatatttttaagagcctgctcgttttgtaaaa

SEQ ID NO: 976 - DNA, 263 bp, Nicotiana tabacum
gtctgggaatgctttggagtgcgtagtatagtgcgcgtcagctacctaacttgtatttatagaattccaagtatatgctgggtctgtgttcagagtagcatgaacaggcctttcctgtttgttgaatttacctcatatgtttattgcagcaggaacttgagttgagacattagatgattgctggtatatatttttaagatgcttgctcgttttgtacatgtttcttttagatgtaggaccttaccgttgatttcccttcaaaa

SEQ ID NO: 977 - DNA, 208 bp, Nicotiana tabacum
gctcgtgctaggttccagaaatcttaccgttaaaattcctatttcgatttatggtatctgtttttatccctgttggtatggttttggtttaggaatcattatggatttactgctatctgagaaagttttggatttggataaactttaatatagctgtttcacatgctatgaaatatgaatgcaatgaattgtgcttttatttgcaaaa

SEQ ID NO: 978 - DNA, 310 bp, Nicotiana tabacum
  misc_feature (213)..(213): n = a, t, c, or g
gctgcagttgctgttgctgctcccgctggtggtggtgctggtgctgcagcagctgcccctgctgcagaggataaagaaggaagatgcccaaggaagaaagtgatgacgatcatggggttcagtctgtttgactaggatgctcctttcagtatgatatcccggttccttttagatgaattgatgaaacttggtaatagcaccctttataaggangatttttgattctgtttgtcacaataaatgtaatcttgaggttatgattatgaacatctgtcatgtcagtattttgctacttatgtcgactccaaaa

SEQ ID NO: 979 - DNA, 347 bp, Nicotiana tabacum
  misc_feature (294)..(294): n = a, t, c, or g
gctgcagttgctgttgctgctcccgctggtggtggtgctggtgctgcagcagctgcccctgctgcagatggataaagataggaagatgcccaaggaagataagtgatgacgatcatggggttcagtctgtttgactatggatgctcctttcagtatgattatttggttcctttttatgatgaattgattgataacttggtaatagcaccctttataaggatgatttttgattctgtttgtcacaattaaatgtaatcttgatggttatgatttatgaacatctgtcatgtcatntaattgctacttattgtcgactccaatcatgtccctttattgctgtgacaaaa

SEQ ID NO: 980 - DNA, 217 bp, Nicotiana tabacum
gtctgggaatgctttggagtgcgagtatagtgcgcgtcagctacctaacttgtatttatagattccaagtatatgctgggtctgtgttcagagtagcatgaacaggcctttcctgtttgttgaatttacctcatatgtttattgcagcaggaacttgagttgagacattagatgattgctggtatatatttttaagatgcttgctcgttttgtaaaa

SEQ ID NO: 981 - DNA, 579 bp, Nicotiana tabacum
  misc_feature (305)..(305): n = a, t, c, or g
  misc_feature (483)..(483): n = a, t, c, or g
caggtgtgcaatttattcggaaaaatgctcaaatctcaaagcagcgagtcacgaaaaaaaaagttacagaagctctacaacctctctaaacaacaaatgaacagagatattgcaccatcccatccccttatatggatgcaaagtattctttgctgcccttaggatctggcttcattgacttgtcaccaggcttccacccagctgggcatacttcatctgggttctcctgaacatattgcaatgcctgaagtgtcctcaatgtttcatcaacacttcggccaattgcaagattattaatggtggangtgttggataactccttccttgtcaatgataaaaagtcctctcagtgcaattccctgatccggtatcagtacattgtaagattttgaaattgactttgtcacatccgaaattaatggatagttcagatcaccaaggccaccagacttcctatcagtttggacccaggcaaggtggganaaacacactgtctacggagacacccaatatttctgtgttcaccttctgaaattcttcataacgatcactgaaagcagtgatctctgtcgggcaaac

SEQ ID NO: 982 - DNA, 605 bp, Nicotiana tabacum
  misc_feature (72)..(72): n = a, t, c, or g
  misc_feature (82)..(82): n = a, t, c, or g
  misc_feature (104)..(104): n = a, t, c, or g
  misc_feature (161)..(161): n = a, t, c, or g
  misc_feature (193)..(193): n = a, t, c, or g
cggccgccatggcggctgcggcgtagcggtatgcagctcactcaaaggcggtaatgacggttatgccacagnaatgcagtgngatgaacgcaggaaagaacatngtgagcaaaaggccagcaaaaggccaggaaccgtaaaaaggccgcgttgctggcgtnttttccataggctccgcccccctgacgagcantcacaaaaatcgacgctcaagtcagaggtggcgaaacccgacaggactataaagataccaggcgtttccccctggaagctccctcgtgcgctctcctgttccgaccctgccgcttaccggatacctgtccgcctttctcccttcgggaagcgtggcgctttctcatagctcacgctgtaggtatctcagttcggtgtaggtcgttcgctccaagctgggctgtgtgcacgaaccccccgttcagcccgaccgctgcgccttatccggtaactatcgtcttgagtccaacccggtaagacacgacttatcgccactggcagcagccactggtaacaggattagcagagcgaggtatgtaggcggtgctacagagttcttgaagtggtggcctaactacggctacactagaaga

SEQ ID NO: 983 - DNA, 485 bp, Nicotiana tabacum
aaagagacgctgcggttgcgtgactctaaggggaagccaccaggagttctaggatggtggccttcaagggctgtgacttttattgataatcacgacactggatccactcaggcacactggcctttcccttcaaatcacattatggagggctatgcgtacattctaacacatccagggataccatcagttttctatgaccatttctacgattggggtaattccacgcatgaccaaatatttaagctgattgatatccgaaggcatcaaggcatacacagccgttcatctgtacagattcttgagtcacaaccaaacttatacgctgcaaccattggagaaaaggttagcatgaagatcggggacggatcatggtgtcctgcaggcaaggagtggaagcttgcaaccagtggctatcgctatgcagtctggcagaagtaataagtagagcatagagctattctctttctcaaaaatatagactaaaa

SEQ ID NO: 984 - DNA, 480 bp, Nicotiana tabacum
  misc_feature (434)..(434): n = a, t, c, or g
gcggccgcctgcaggtcgaccatatgggagagctcccaacgcgttggatgcatagcttgagtattctatagtgtcacctaaatagcttggcgtaatcatggtcatagctgtttcctgtgtgaaattgttatccgctcacaattccacacaacatacgagccggaagcataaagtgtaaagcctggggtgcctaatgagtgagctaactcacattaattgcgttgcgctcactgcccgctttccagtcgggaaacctgtcgtgccagctgcattaatgaatcggccaacgcgcggggagaggcggtttgcgtattgggcgctcttccgcttcctcgctcactgactcgctgcgctcggtcgttcggctgcggcgagcggtatcagctcactcaaagcggtaatacggttatccacagaatcaggggataacgcangaagacatgtgagcaaaaggccagcaaaaggccaggaaccgtaaaa

SEQ ID NO: 985 - DNA, 306 bp, Nicotiana tabacum
gggtgcaggatatggtactcttggaggtctcggaacaatttggggtgcctcttcaatttcgggtcaaggtggtggaaatggttcttttggcagtggcaacatcactaacagtggtgaaacaggtggggcagtgtatggacgaaactcgggcggcaatgctgtcaatacatcaccatatgctccagcaaaagacgttcacactggggcttttgggaacttgtatggtactgtaggtgcttcactttatgaggactcggcctggcgttcagcatctccagatactagatggctctgcttcctttggtt

SEQ ID NO: 986 - DNA, 263 bp, Nicotiana tabacum
cataacttgttacaacaagctctaaaactgcaagaatattaatactattacatcttacaagtacaaagcttcagtgaccttatccatggatggcctcacctttgtaggagcagcacctgctgcaaccataataattccggcggccgcagcaaccataataattccggcggccgcagcaaccatagcggcagtatcctccaccgcgtccgccacctccacgtccaccaccactgcgtcctccacctccacgtccaccacacccc

SEQ ID NO: 987 - DNA, 236 bp, Nicotiana tabacum
ttgtcaacaccaaaggaattcacttggtatacatctaaatatggattaccttagagaccctaggaattatagcaactcaagaactctgtcagaggatggacattgagaataatcatcaaaggagcaagaggcccatacattagaataccttatatagccaatgaggggactcagcacagaacatcatagcaagtgcaaatattgcagctggaatagtaggtacccaaaagcacccc

SEQ ID NO: 988 - DNA, 271 bp, Nicotiana tabacum
ggtgttgggaatgtctggagtggcagtatagtgggcgctacgccaccaacctgtatttatagattccagtatatgctgggtctgtgttggagtagctgaacggcctttcctgtttgttgaatttacctcatatgtttattgcagcaggaacttgagttgagacattagagattgctggtatatatttttaagatgcttgctcgttttgtacatgtttcttttagagtaggaccttaccgttgatttcccttcagcagattttagacgattt

SEQ ID NO: 989 - DNA, 259 bp, Nicotiana tabacum
  misc_feature (212)..(212): n = a, t, c, or g
ggtggttgacacgtggtaagcaacgactatggtggaaatagaaaggaggaaggaggagataggagaaataattggaaaaacagaagataatgcctctcacgcgcctcaacagtggggtgttacatacattatgctatgtcagcaatttgtgtctaattgacacaatttgcattcacctcaagtgttcaataggcactattattagttgaatntgtttgagtgaaaaatattgcccaagtttatggggccgcctatgtaa

SEQ ID NO: 990 - DNA, 399 bp, Nicotiana tabacum
gtgccgttgtggcgatgcggtagagtatggcaggagttgggacggagaataatagaggaagatgaataggtggttgcacagtggtaagcaacgactatggtggaaatagaaaggaggaaggaggagataggagaaataattggaaaaacagaagataatgcctctcacgcgcctcaacagtggggtgttacatacattatgctatgtcagcaatttgtgtctaattgacacaatttgcattcacttcaagtgttcaataggcactattattagttgaagtgtttgagtgaaaaatattgcccaagtttatggggccgcctatgtattctgtctttaattaaagtactgaaatatattgtaaattattagaggaaattagtaaaagattgaaatttcata

SEQ ID NO: 991 - DNA, 336 bp, Nicotiana tabacum
gtgcttatgctggaggagcagggggagcagcaggtggtggatacggtagtggaggtgagcatgctggtggatatggaggaggtgctggaggtggtgaaggtggtggacacggtggtggctacgccccttgattgctcattctaatcaccaattgaaatctaaaaatttccctattcatgcctacactactaaaaaataatgtaatcaaattgtggtgggaagatgatatatcgcgaaggcaaaagaaatgcagcaaggaaaggctgcatcttaagtgtattatcgtttcctttgatagcaaaattaaggtatatatgatgcttgcattttaagtaa

SEQ ID NO: 992 - DNA, 405 bp, Nicotiana tabacum
cgggtacgctctgctctctcgcgacccctactctaatcaaaagactaaaggcccctactgaagataggtcgccaaactacgaccgagagtttcgccttttgaagcgccagtcgcgtagggcgaccgggccaggccgagtcggataaggctttgatgactcaaggttcatattggggaaaggagagtgaggggaagagggggcagccctcggcccgatcatccaattgcgctccaacagacaggcatggttctgtagatcaaagcaacttcgtcactattcgtgtacctcggccgcgaccacgctaatcactagtgaatacgcggccgcctgcaggtcgaccatatgggagagctcccaacgcgttggatgcatagcttgagtattctatagtgtcacctaaataa

SEQ ID NO: 993 - DNA, 247 bp, Nicotiana tabacum
tataattattttcggagaagtatagtcaaattactgtgaaaaaacatatactactaatatttctcataccaaacataaacaatacatgcaaaattagttctctaaaaatccaataaagaagtttatgcccaattgaaccaagtgctttcgactgctgcaagtcaattccagcatgtgattatcaaaattgcataaaaactagctacaataaagataagatcaatctaagagaagcttgagctacggg

SEQ ID NO: 994 - DNA, 234 bp, Nicotiana tabacum
gaggaaaagaaggaagatgcccaaggaagaaagtgatgacgacatggggttcagtctgtttgactaggagctcctttcagtatgatatttggttcctttttagagaattgatgaaacttggtaatagcaccctttataaggagatttttgatctgtttgtcacaattaaatgtaatcttgaggttatgatttatgaacatctgtcatgtcagtaattgctacttattgtcgact

SEQ ID NO: 995 - DNA, 414 bp, Nicotiana tabacum
gtgctgcagttgctgttgctgctcccgctggtggtggtgctggtgctgcagcagctgcccctgctgcagaggaaaagaaggaagagcccaaggaagaaagtgatgacgacatggggttcagtctgtttgactaggagctcctttcagtatgatatttggttcctttttagagaattgatgaaacttggtaatagcaccctttataaggagatttttgatctgtttgtcacaattaaatgtaatcttgaggttatgatttatgaacatctgtcatgtcagtaattgctacttattgtcgactccaatcatgtccctttattgctgtgacactttgaagtttccatgtgcatttgtagctgtattcttatagtaagtactggcgaggagaaaaccattcctacccttttcccaaaa

SEQ ID NO: 996 - DNA, 293 bp, Nicotiana tabacum
gttgctgttgctgctcccgctggtggtggtgctggtgctgcagcagctgcccctgctgcagaggaaaagaaggaagagcccaaggaagaaagtgatgacgacatggggttcagtctgtttgactaggagctcctttcagtatgatatttggttcctttttagagaattgatgaaacttggtaatagcaccctttataaggagatttttgatctgtttgtcacaattaaatgtaatcttgaggttatgatgtatgaacatctgtcatgtcagtaattgctacttattgtcgact

SEQ ID NO: 997 - DNA, 442 bp, Nicotiana tabacum
gtggccttgtggggcatgggcgtagagtatggacggagttgggatcgagaataatagaggaagatgaatgtaattttgtggtgccctctttctattgaatgtttaagtgatttttaataaaaatgtttagtgttgtttgtaaatattttggtcactgaaattgaatttgaaatgtagaggtggttgtacagtggtaagcaacgactatggtggaaatagaaaggaggaaggaggagataggagaaataattggaaaaacagaagataatgcctctcacttcgcctcaacagtgggggttacatacattatgctatgtcagcaatttgtgtctaattgacacaatttgcattcacttcaagtgttcaataggcactattattagttgaagtgtttgagtgaaaaatattgcccaagtttatggggccgcctatgtattctgta

SEQ ID NO: 998 - DNA, 298 bp, Nicotiana tabacum
gtgctgcagttgctgttgctgctcccactggtggtgccggtgccggtgctgcagctgctgcccctgctgcggaggaaaagaaggaagatgcccaaggaagaaagtgatgacgacatgggattcagtctgtttgattaggatgctcctttcagtatgatatttggttcttttttagagaattgatgaaacttggtaatagcacccttgttaaggagatttttgatctgtttgtcacagttaaatgtaatcttgaaaggttacgatttatgaacatctgttatgtcagtaattgttaaaa

SEQ ID NO: 999 - DNA, 272 bp, Nicotiana tabacum
cgctggtggtggtgctggtgctgcagcagctgcccctgctgcagaggaaaagaaggaagagcccaaggaagaaagtgattgacgacattgggggtcagtctgtttgactaggagctcctttcagtatgatatttggttcctttttagagaattgatgaaacttggtaatagcaccctttataaggagatttttgatctgtttgtcacaattaaatgtaatcttgaggttatgatttatgaacatctgtcatgtcagttattgctacttaaaa

SEQ ID NO: 1000 - DNA, 282 bp, Nicotiana tabacum
ctggtggtggtgctggtgctgcagcagctgcccctgctgcagaggaaaagaaggaagagcccaaggaagaaagtgatgacgacatggggttcagtctgtttgactaggagctcctttcagtatgatatttggttcctttttagagaattgatgaaacttggtaatagcaccctttataaggagatttttgatctgtttgtcacaattaaatgtaatcttgaggttatgatttatgaacatctgtcatgtctatgtaattgctacttattgtcgactccaaaa

SEQ ID NO: 1001 - DNA, 359 bp, Nicotiana tabacum
gtgctgcgcaaaacgttagggcaacatatcatatatataacccgcagaatgttgggtgggatttgtatgcagttagtgcgtactgctcaacttgggatggtaacaagcctttggcatggaggaggaagtatggttggactgcattttgtggccctgttggacctcgtggccgagactcttgtggcaaatgcttaagggtgacaaatacaggcacaggagctcagaccacagtgagaatcgtggatcaatgcagcaatggcggactagacttggacgttaacgttttccggcagctcgacacagacggaagagggaatcaacgtggccaccttattgtgaactacgagtttgttaattga

SEQ ID NO: 1002 - DNA, 399 bp, Nicotiana tabacum; identical to SEQ ID NO: 990

SEQ ID NO: 1003 - DNA, 376 bp, Nicotiana tabacum
ataatacacttaaggtgcagcatttctttgctgcaattcttttgccttcacgatatatcatcttcccaccacagtttgattgcattattttttagtagtgtaggcaagaatagggaaatttttagatttcaaatggtgattagaatgagcaatcaaggggcgtagccaccaccgtgtccaccaccttcaccacctccagcacctcctccatatccaccagcatgctcacctcctccagcgtaggctccacctccaccggcaccactaccgcctccaccgcctccatatgctcctccatgtgctcctcctgcaccaccaccggctcctcctccactaccgtatccaccacctgctgctccccctgctcctcctgcat

SEQ ID NO: 1004 - DNA, 421 bp, Nicotiana tabacum
ctagatgtcaattcacaagtggctcttgaggcgaaccaacgttccgaaccggaaaaaagcattcagggcggtactcgatccgtagctcgagacacccataacgtgaaggagatcgaagtcagcttacgggtgatcttcgagatgttacaagcccagcaaatagcgataactcacttgcagagccaaactcaggaacaaagcaggccggagcccaatccgcttcgagaaatcacccacagaacggaaccagccatagtaaagtcaaacgagccagaatcggggactactcccgaaattactaaattgctcgaggaactcacaaaacgagtcgaagccgacgataaaaaagtagaaacatataattccagggtcgatcagatcccgggatctccaccaatgataaaagggctagattcgaaaa

SEQ ID NO: 1005 - DNA, 347 bp, Nicotiana tabacum
  misc_feature (227)..(227): n = a, t, c, or g
gtgctgcagttgctgttgctgctcccactggtggtgccggtgccggtgctgcagctgctgcccctgctgccggaggaacaacgaagcgaacaccccacaggaagaaagtgatgaccaccctgggattcagtctgtttgattaggagctcctttcagtatgatatttggttcttttttagagaatcgatgaaacttggtaataccacccttgtctaaggagatttccngatctgtttgtcacagttaaatgtaatcttgaggttacgatttatgaacatcctgttatgtcagtaattgttacttatcgctgtctcccaattatgtccctttattgctgtgaccatttt

SEQ ID NO: 1006 - DNA, 525 bp, Nicotiana tabacum
gtgctgcccgatactttaaggatgcttatgacaggggtcttacaccatatgagttcgtcgaaagtatgaagaagaagggcatcagagtgcctggaatcggtcacaggatcaagagaggtgacaacagagataagagagtggaactactgcaactttatgcgagggaaaatttcccttctgttaagtacatggaatatgcagttcaggtagaaacctacacactctcaaaggcaaacaacctagtcctcaacgttgatggcgccattggttccctcttcttggatctccttgctggaagtggaatgttcaccaaaccagaaatcgatgaaatagtagagatcggttacctgaatggtctgtttgtgctggcacgttctattggtcttatcgggcacacgtttgatcagaagagattgaagcagcctctataccgtcacccatgggaagatgttaatcactagtgaatacgcggccgcctgcaggtcgaccatatgggagagctcccaacgcgtgggatgcatagct

SEQ ID NO: 1007 - DNA, 294 bp, Nicotiana tabacum
gtgctgcagttgctgttgctgctcccgctggtggtggtgctggtgctgcagcagctgcccctgctgcagaggaaaagaaggaagagcccaaggaagaaagtgatgacgacatggggttcagtctgtttgactaggagctcctttcagtatgatatttggttcctttttagagaattgatgaaacttggtaatagcaccctttataaggagatttttgatctgtttgtcacaattaaatgtaatcttgaggttatgatttatgaacatctgtcatgtcagtaattgctactaaaa

SEQ ID NO: 1008 - DNA, 176 bp, Nicotiana tabacum
gtgccttgtataatgatggttgatagtggtggtagtggttggttatagtggctggtagtggtagtactggtggttggtagtggtaatagtgattgttgtgcaatgatggctggtggtgattgtggacagaatggtggtgaaagttgattttcggaaaattctttaattcaatagta

SEQ ID NO: 1009 - DNA, 314 bp, Nicotiana tabacum
tcccatatagggtgaacataaaatcgcaaattaaaagtttcgtctaaaatctgctgaagggaaatcaacggtaaggtcctactctaaaagaaacatgtacaaaacgagcaagctcttaaaaatatataccagcaatctctaatgtctcaactcaagttcctgctgcaataaacatatgaggtaaattcaacaaacaggaagggcctgttcatgctactctgaacacagacccagcatatacttggaatctataaatacaagttaggtagctgacgcgcactatactcgcactccaaagcattcccagacacccc

SEQ ID NO: 1010 - DNA, 292 bp, Nicotiana tabacum
ttaattcattgagagcatctctcacaataactaagtcaactgaaagcacctaacaagggcttatttcaatccacacattgaaggccataattggcaatggttgttataaaaatgagatttctcctctccaaattcaaaatgtcactccaatacagttccacctcaatgaagctctctgtctagatccatttcctaattgaggatcaggttgagctcacaagaacaaatagtggcttatcacctaacctgtcccggcccttcaattctggcaactcaataagacatgcacccc

SEQ ID NO: 1011 - DNA, 315 bp, Nicotiana tabacum
  misc_feature (104)..(104): n = a, t, c, or g
gtgctgcgttgctgttgctgctcccctggtggtgccggtgccggtgctgctgactgctgcccctgctgcggtgagtaaaataaggaagagcccaaggaagaaangtgattatcatcttgggatttcatgtctgtttgatttaggatgctcctttcagtatgatatttggtccttttttagatgaattgatgaaacttggtaatagcacccttgttaaggagatttttgatctgtttgtcacagttaaatgtaatcttgaggttacgatttatgaacatctgttatgtcagtaattgttacttattgctgtctcta

SEQ ID NO: 1012 - DNA, 251 bp, Nicotiana tabacum
gtgctgcagttgctgttgctgctcccgctggtggtggtgctggtgctgcagcagctgcccctgctgcagaggaaaagaaggaagatgcccaaggaagaaagtgatgacgacatggggttcagtctgtttgactaggagctcctttcagtatgatatttggttccttttagagaattgatgaaacttggtaatagcaccctttataaggagatttttgatctgtttgtcacaattaaatgtaatcttgagga

SEQ ID NO: 1013 - DNA, 264 bp, Nicotiana tabacum
gttgaactaaacattagatgcaaattctgaaacttgttcaacaccagtggtgtgacaacaaaacattagaaagattcaacaaatactatgcttctccacctcccaaaacagaacaacaattacagcacacctccatccaccacacaaaataagatcaacatagcacatcatccctactactaaattttaataccatcactgtctttaacaaaaagatctaaaatcaccaacagagctaccacacttgatcaatttaagcacccc

SEQ ID NO: 1014 - DNA, 250 bp, Nicotiana tabacum
gtgtcatgggatccaaatcacaagccagaaccaaggcgaaagagagggttctcgccaaggaagcagcacagagaatgaactagagcttctattgtatgttgctgttggattaaacctctacctctaccaattttgtgcttttggttcgcatgcttgagcaatgttagagatcctacgtggattagacttttatatttactttgtgttacagattatgtttttatgcaaaaagactttcctactttgtcaa

SEQ ID NO: 1015 - DNA, 252 bp, Nicotiana tabacum
gtattacatttaactgtgacaaacagatcaaaaatctccttaacaagggtgctattaccaagtttcatcaattctctaaaaaagaaccaaatatcatattgaaaggagctcctaatcaaacagactgaatcccatgtcgtcatcactttcttccttgggctcttccttcttttcctccgcagcaggggcagcagctgcagcaccggcaccggcaccaccagtgggatgcagcaacagcaactgcagcacccc

SEQ ID NO: 1016 - DNA, 277 bp, Nicotiana tabacum
gtgctgtcattttggttgcttttcttttgatagcagtgaaagaaagaaagaaagaggcattgcattgggggcagaggaagagagtttttgtatactgagagtaacatgaaaaggggagaaagcagagactaaagatgcgctggctggtccagtcctgtctttgctcacttttgtttttctgccctttcctccttttactgtgttggagttggcgtgggtttgttgaatttgtccctcttttgctgatagatgtgagtttacaataaatggggttgtt

SEQ ID NO: 1017 - DNA, 234 bp, Nicotiana tabacum
gtgacaaacagatcaaaaatctccttataaagggtgctattaccaagtttcatcaattctctaaaaaggaaccaaatatcatactgaaaggagctcctagtcaaacagactgaaccccatgtcgtcatcactttcttccttgggctcttccttcttttcctctgcagcaggggcagctgctgcagcaccagcaccaccaccagcgggatgcagcaacagcaactgcagcacccc

SEQ ID NO: 1018 - DNA, 385 bp, Nicotiana tabacum
taatacacttaaggtgcagcatttctttgctgcaattcttttgccttcacgatgtatcatcttcccaccacaatttgattacattatttttatgtagtgtatggtaagatagatgggataatttttatgatttcaaatggtaattatgaatgatgcaatcaaggggcgtatgccaccaccgtgtccaccaccttcaccacctccagcacctcctccatatccaccagcatgctcacctcctccagcgtaagctccacctccaccggcaccactaccgccaccaccgcctccatatgctccgccatgtgctacctgcaccaccaccggctcctcctccactaccgtatccaccagctgctgctccccctgctcctccagcataagc

SEQ ID NO: 1019 - DNA, 320 bp, Nicotiana tabacum
gtgctgcagttgctgttgctgctcccgctggtggtggtgctggtgctgcagcagctgcccctgctgcagatggataaagaaggaagatgcccaaggaagataagtgatgacgatcatggggttcagtctgtttgactatggatgctcctttcagtatgatatttggttccttttatgatgaattgattgaaacttggtaatatgcaccctttattaaggatgatttttgattctgtttgtcacaattaaatgtaatcttgatggttatgatttatgaacatctgtcatgtcagtatattgctacttattgtcgactaaaa

SEQ ID NO: 1020 - DNA, 325 bp, Nicotiana tabacum
  misc_feature (124)..(124): n = a, t, c, or g
  misc_feature (135)..(135): n = a, t, c, or g
  misc_feature (169)..(169): n = a, t, c, or g
  misc_feature (176)..(176): n = a, t, c, or g
  misc_feature (295)..(295): n = a, t, c, or g
gtgctgcagttgctgttgctgctcccactggtggtgccggtgccggtgctgcagctgctgcccctgctgcggatggataaagataggatagatgcccaaggatagataagtgattgacgatcantgggatttcangtctgtttgatttatggatgctcctttcatgtantgattantttggttcttttttatgatgatattgattgataacttggtaatatgcacccttgttaaggatgatttttgattctgtttgtcacagttaaatgtaatcttgatggttacgatttatganacatctgttatgtcagtaattgttacttaa

SEQ ID NO: 1021 - DNA, 294 bp, Nicotiana tabacum
  misc_feature (162)..(162): n = a, t, c, or g
  misc_feature (165)..(165): n = a, t, c, or g
gtgctgcagttgctgttgctgctcccgctggtggtggtgctggtgctgcagcagctgcccctgctgcagatggataaagataggaagatgcccaaggaagataagtgatgacgatcatggggttcatgtctgtttgactatggatgctcctttcagtatgantantttggttcctttttatgatgaattgattgaaacttggtaatatgcaccctttataaggatgatttttgattctgtttgtcacaattaaatgtaatcttgatggttatgatttatgaacatctgtcatga

SEQ ID NO: 1022 - DNA, 333 bp, Nicotiana tabacum
  misc_feature (136)..(136): n = a, t, c, or g
  misc_feature (171)..(171): n = a, t, c, or g
gtgctgcagttgctgttgctgctcccgctggtggtggtgctggtgctgcagcagctgcccctgctgcagaggaaaagaaggaagatgcccaaggaagataagtgatgacgacatggggttcagtctgtttgactanggatgctcctttcagtatgatatttggttcctttnagatgaattgatgaaacttggtaatagcaccctttataaggagatttttgattctgtttgtcacaattaaatgtaatcttgatggttatgatttatgaacatctgtcatgtcatgtaattgctacttattgtcgactccaatcatgtccctttattgctgta

SEQ ID NO: 1023 - DNA, 359 bp, Nicotiana tabacum
gtgcatagggttgaactttggcatgttagaagccaagctcgcttatctcgaattctgcagctcttttggtttgaactttctccttcctacactcatgctccttacagtactctcattcttaaacctcagtatggtgctcacataatcttgcacaaactttgaccaatcgatcacgcgggcttgttattgtcatttccaataaggttgatcagaaatctagcttttgctatttatgcatttcagatacactatcattttatgaatttggatgtcatgatatgcttgttgttagaataaacgctttgtatttgtagtaaatggtatctgaaatagattgtactaatcaagatgtgaaccaa

SEQ ID NO: 1024 - DNA, 282 bp, Nicotiana tabacum
ttttggaggggatggtgttacattttgcaataaattcggcaaaaagacaaagttttcgaacgtaacacttcagaattaaaagttaaagagtaaaacagaaagtgactatttctatcccatccattataattatacactgtagtatacacgtcagaaaaaaaagaagaggaaacaccttggtttgaaaaatagacttagacaaaaaaaaaaaggacaaaaaaaaaacaaaaacaaaaataattacgatctagtaaccataataataagagttggatgatcaag

SEQ ID NO: 1025 - DNA, 446 bp, Nicotiana tabacum
ttttgcaataaattcggcaaaaagacaaagttttcgaacgtaacacttcagaattaaaagttaaagagtaaaacagaaagtgactatttctatcccatccattataattatacactgtagtatacacgtcagaaaaaaaagaagaggaaacacctgggtttgaaaattagacttaaacaaaaaaaaagacaaaaaaaaaaacaacaaaaataattacgatctagtaatcataataataagagttggatgatcaagttgaaaaaggcgagcttctggagccgtcaaaacatctgacgacgacagacaggagaattcaagaaagccgagagaaccatgttctggttcttgttacagagattcaatctttacataactgtgattgaaaatcgatagtgtgaatgatcaccatcaatatgctgacaagataaaacaaacaaacaaaaaaa

SEQ ID NO: 1026 - DNA, 401 bp, Nicotiana tabacum
tgcccgaggacttaacagtgtaagagcagagacagtgaaggagattgtgacttcctggttagtaacaattccagcgggtgctacctttgctgttagctacacatggatattcactaagctcttatcatacatactctgagtgtaaattaacggataacgccaccactcaaacttcttggattaataataaaatcacacagataaccttttttgtcgtgatttgagaaatgcaatttttgaaccttgtggaggatccatgataaagagtagtagtccattcagtttagaagacgaacaagctttgttttctgcctagcactttgcctccctatataagctgctaacttttgtgttggatttaagcaaatgtgattttgtttctttgtattttacttccaaaa

SEQ ID NO: 1027 - DNA, 449 bp, Nicotiana tabacum
gcccggactcttccgattacctcccataattgcttccctgcccttgaaattgtataatttaatgtgacatccgttggttttccagtgttcaggaatgaactacttacaacaaaactggatatggttttgagaaagggataatgtcactgcaagggtatttaatgtttcagatctgtggttggaattggaaactaatgttgctgcagctggtatgaacctccatagatttgtttcaagataatgaatgtgctaacgtagagatcaatgtttgacctgtttttctttcttattttctgttttgcccattcctggattgcgtgcttgggtttgcttgctttttgtttctttttccattcaacgtttttgtcctaccattccatgtattgtggacacggttagaaacccaaaacaatattttataatactaaacgaagatacttcgagcaaaa

SEQ ID NO: 1028 - DNA, 468 bp, Nicotiana tabacum
tatgaaaaactgggcgtgaagtaaaatggatgggtaaacctgataagataatatacagtcagctatgaaaatggctgctgaggatgcctctgattgtattgccataggagactccctccaccatgatatcaaaggtgcaaatgcagctggaattgcatccgcatttattacatgtggaatccatgctactgaacttggacttgacaaatttggagaggtcgcagatgataactctatacatgctcttgccttgcaaaacaatgcacatcctacatatgttatcccttcatttacatggtgaagaatgtgctatttgggcttggctaaaattttgtccctccagtgtttagcattgatgtgtccaagtacctaataatgctactcactttgtacctcttttgattcttttggatgaaatggtttttccgttaaccatctaatttgtctaaagggagtcttggagcaaaa

SEQ ID NO: 1029 - DNA, 401 bp, Nicotiana tabacum
tttaagtaagaaattagcagttgatgtcagccctgaaaatcaggagctaagaagtaaaagtattatataaacatccattaacgtaaaaaaaaaaacaaaaaaaaacatgagttgactgaagttgtctggaaaagggtacaaaattgtcgtgactgaattgaaaaaaagctgtcatgatggtcattgtacagcttctgccacttgaaggagcgggaacagaggcaggagatctggtctgtcaccaacagctaatgaaatgcactatcttaatcttctagcttctctttctgattccagaagagtgaggatgtctccttctcgcaccggacctttgacattcctgatgatttgacgattttgttctcctaaaaattcaactttgacttgggtacactgtccct

SEQ ID NO: 1030 - DNA, 415 bp, Nicotiana tabacum
acgagaagctaataaagctcttctaatgaaccgttaaaattgcttttcttgtagcattacaaaacacttctctctttaaatagaaagtttattacaatggcagagtaatattcttacaaaatagaattcatccatctctttcaggttagtgaaactgaaaccttcaattctaatgatggaaatcatatctccttgcgacattattcgatcaaccaaggttcttgaactggtgtccatgagcacagttcaccttctccaaaccaaagcgctatttcacgcttgccattgtcagggctatcacttccatgcaccacatttcttccagtttgaacagcaaggtctcctctgattgtgccgggctccgcgttaagtggattagttgctcctattagcttacgggcagatccgcctccca

SEQ ID NO: 1031 - DNA, 204 bp, Nicotiana tabacum
ggactcttccgattacctcccataattgcttccctgcccttgaaattgtataatttaatgtgacatccgttggttttccagtgttcaggaatgaactacttacaacaaaactggatatggttttgagaaagggataatgtcactgcaagggtatttaatgtttcagatctgtggttggaattggaaactaatgttgctgcaaaa

SEQ ID NO: 1032 - DNA, 284 bp, Nicotiana tabacum
cggcgaccaaaccccagtgaaaagctccggcagcagtctcctcacgcgccaccagaagctcacgcgcgtgagctcacgcgccggcgcgtacgaccacttccggccattttttgaaaatcttccttaagaacagttgggtcgcctggtagagttgtcccatccaaatgcagagcttagattactcgaagtcttctatcacaagatttataagatctttccgctcactgaaaagattgagaatataaatgaccagtattggacattgcgggcagatccgccgccca

SEQ ID NO: 1033 - DNA, 424 bp, Nicotiana tabacum
  misc_feature (84)..(84): n = a, t, c, or g
  misc_feature (87)..(87): n = a, t, c, or g
ccttttttgcttccctgcccttgtaatagtttataattttagtgtcatccgttggttttccgatgttcaggaatgaactactancancaaactgattttggttttataaagggtaatgtcactgcaagggtatttaatgtttcagatctgtggttggaattggaaactaatgttgctgcagctggtatgaacctccatagatttgtttcaagataatgaatgtgctaacgtggagatcaatgtttgacctgtttttctttcttattttctgttttgcccattcctggattgcgtgcttgggtttgcttgctttttgtttctttttccattcaacgtttttgtcctaccattccatgtattgtggacacggttagaaacccaaaacaatattttataatactaaacgaagatacttcgagcaaaa

SEQ ID NO: 1034 - DNA, 546 bp, Nicotiana tabacum
cgggcccttgagagtatcaatagcatacctgccgctgtatagggaatgtgtcaaggcagggggttgcttgttatcacaaaggcttagggggcagctcgtggaagcagcgaaaaggcttgacggcgtcgtgttggaagaggtaaaccagggaagagaattattggctgttttggagcatcatattcccccatttttggtaaatgcatccaatggtgcttaggatgatagcatcttttagattttgaaaaaatttcacctctcttcactctcccttcacaaagtacaataacacaatagttggtggggttgaaggtgagcaaaatgtcctcaaggttggtcaattatctgaatgaaccagttgttggcttagatacataaatctgcagggagttgtacaatgcatattctgatgtgtatgttgagtaaactacattcagaaggctggtaacgcgaatgggcatacacgtaggctatttcgtggcgcttctccttctttatccggtgttacactaaaccaataaatacatgacatgtctttcaataaaa

SEQ ID NO: 1035 - DNA, 605 bp, Nicotiana tabacum
cggaggaagcggcgagtcggccacgctgatttttccagtttgtgcatcaacagagaacaagagaggcttactcgtcgagctcaggttccctcgctgcagatcgtaaagcaccatcccgtttcgccccaaatctgggtcacgtgcctccacctttccgacaacgtgaccgattggagcattttgagaaactgtaaattcgtataaattcgttggcgcaaacacaggattattatcgttggcatcgagtaaggtcacctcgaccgaaacaaaggagtcactctccaaattcgttgaaatgaggaaggaagtttctctctcgcgtaaacacgcatgccgagagacggttttgtctcacggtccaatttcgcttgatttctcacagttaaccaaccagaatgactgtcaatactgaatgcttggcttggatccaccagatgatagataaactcaccattgtcaccctgatcttggtcggatgcaacaacttgtaggacactgaacccgttcggtaaattttcgacgatacttatatgtaaacgtccacctcaattgtggctggttatcgtgatgtccagcaattcaacttctacacgggcaacaccagc

SEQ ID NO: 1036 - DNA, 517 bp, Nicotiana tabacum
cggtgtttcaattgccatcatgggttgcattgtgaatggacctggggagatggctgatgctgacttcggatatgttggtggtgctcctgggaagattgacctttacgtcggcaagacggtggttaaacgcggtattcaaatggagcatgcaacagatgccttgatccagctaattaaagataacggccgctgggtggatcctcctgctgaggagtaagatcaactggaagagttaacagataacaattgcattgtaaatgcagattctagcacctgataataatacagcatcagcaaactccagaaagctgccatttccaagcagctgagatgtagctttttatgttgtttgtagaatctagtacatgcatgcaaatgcagaatattcatgtattaatcaattctagttaccagtccccttcttgggaatctagtaacaggctatatcattgttcattaatgaccgatctacgtagtgagggcagcccggtgcactaagtatttcgcattcacgcag

SEQ ID NO: 1037 - DNA, 408 bp, Nicotiana tabacum
cgtaagctaataggagcaactaatccacttaacgcggagcccggcacaatcagaggagaccttgctgttcaaactggaagaaatgtggtgcatggaagtgatagccctgacaatggcaagcgtgaaatagcgctttggtttggagtaggtgaactgtgctcatggacaccagttcaagaaccttggttgatcgaataatgtcgcaaggagatatgatttccatcattagaattgaaggtttcagtttcactaacctgaaagagatggatgaattctattttgtaatgatatattactctgccattgtaataaactttctatttaaagagagaagtgtgtttgtaatgctacaagaaaagcaattttaacggttcattagaagagctttattagcttctcgttccaaaa

SEQ ID NO: 1038 - DNA, 326 bp, Nicotiana tabacum
cggctgccacagaggaggctttgcactctacaaattaatgttacaaggcgcgaatgatagctaaaaaagtagtctttaggcataaataacttttatgccaaaaagcaataagttggggttgctagcttactggtttggcttgttttaacttttaagcagtttttaacttattttaagtattttttaactttgtcaaacactgaaaaaagctagaaagagcttaaaagctgatttgaccatgttaaaagccaatccaaacactctcttcgtcatattgaaccacaagtttgcttctttactttactatgtattgagctgtatcaaaa

SEQ ID NO: 1039 - DNA, 302 bp, Nicotiana tabacum
cgccgggaccgcggacgcgtcactcccgacgccggtcagacgcgccgtcgggcaggcaatcgccgggaactcgttccgggcgaccctgccggcgttagtcgcggcagaaggggccgaccaaccccgggaggttatcggggcgcgctacgccggccggggcaactcggacggcgcgctgctcccgtctcccaaacgctcagagtcgccgctctaaccggtggcggccgggcaatcaacgaccgcgccaacaaaccctggtcgtgctcagaactgttctcggacccgggcaaatccgcctccca

SEQ ID NO: 1040 - DNA, 354 bp, Nicotiana tabacum
cgctcaattgccattgcttgtccagcattgccttgccttgcccatgtctttgcccctgcttgacatggctttgccttggccattgctatgccaatccgcacgtccaagtttaatgcaccttgcttcagttcaaggtgcgtttgtcaaccccgcatagtccgtcatgccgagcagcccatcatgatgttgtcccaattttcaggttgtgtgccaaggccatcatgaaaatccttgtcacaacccacacttgcttgtcagagaaatgatttaaggtttgcaattattccagaaaactcagagagagcattttgctatgcttattgagggatcaaacccgggcagatcctccgccca

SEQ ID NO: 1041 - DNA, 233 bp, Nicotiana tabacum
cgtccggaatcctcttcagagagaactacaactgcccggcaagagagccgtacaccccacgctactacatcaactagactcgttccttagcggatattcgatgtttaagaagaaccaggcgacaacgaaatgggagaaacatagaaattgagattaatcgcaaactatgaaaatatgcttgaaaaaagtaaaaagaaagaaactcgaaataaaaaaaggttcaaacagcaaaa

SEQ ID NO: 1042 - DNA, 369 bp, Nicotiana tabacum
cgcaaatgctagattgaacattgttaagggcacaagcgtccctgtcgacatatactctctgaactccggtcatcaaggagaaaacacatcttctgtttcaccatgaacaatgtctagtacatgtatacggtataccatcttgtaaatacatcgccttggaattggagagttttttccattgtacttttaagatataaatcaaccatgtacatataccttgatgtacatgcaacttctgtattggagttgataggactaagctggtgacacagctcggccttccactttggtttttgactctgtcgtgaaaaagctatatgttgtactttcctggaaattatactaaaactgcatgttgaaagttcaaaa

SEQ ID NO: 1043 - DNA, 405 bp, Nicotiana tabacum
cggcaaattcaagatgctcgaatcagcaattagtgtgaaccagcaaatttaattaccggaggacagtcactgaaccgaatgaaatcgatacgaatctaaagaccgaatccaagaatctatctaaaaaagctttaagctttgtgtcaaggttgcaaaataggcttaaataaaattacacttgttttcttgatttggccatcttgagtctgccgcgtaaatagtatccttggtggacaaatagctgggggaagagtatctaacggtgatgtcaacaggcatttttttttattttttattttgttggtttgtttttgttattgtttttcttgtcggagtgaattttggaagtttttagtgaagcctcggcgttgtaaataattatgtttactcattttctgaagaaat

SEQ ID NO: 1044 - DNA, 436 bp, Nicotiana tabacum
ggcagctgctccaactcctttttatcatgagcaggaagttcaggagcacaatacatcacgtatctatagaaacatataccaaagcagaagctcaaaactaaagctctagctaataatcctacgttcaacatgtaagtaagaacctgcattactaatcccaacattacatctattcccttaatatcatatgctacgcgcaagaagtgcgcataggtatagaaatatccggtgcagcttactaatagagtgagatacccataattgaactccaaaaggtgatgcaaggctgcagcagtaaccagaggaatggcctcgatcataaatttagccttggcaccaattaaacggaaaggcatgtcgcgatgccaataaacaacagagtacaacacattgatatgaagtatatagccacaacccgggcagatccgccgcccaa

SEQ ID NO: 1045 - DNA, 467 bp, Nicotiana tabacum
tggaggggatggtgttacattttgcaataaattcagcaaaaagacaaagttttcgaacgtaacacttcagaattaaaagttaaagagtaaaacagaaagtgactatttctatcccatccattataattatacactgtagtatacacgtcagaaaaaaagaagaggaaacaccttggtttgaaaaatagacttagacaaaaaaaaaaaggacaaaaaaaaaaacaaaaacaaaaataattacgatctagtaatcataataataagagttggatgatcaagttgaaaaaggcgatgcttctggagccgtcaaaacatctgacgacgacagacaggagaattcaagaaagccgagagaaccatgttctggttcttgttacagagattcaatctttacataactgtgattgaaaatcgatagtgtgaatgatcaccatcaatatgctgacaagataaaacaaacaaacaaa

SEQ ID NO: 1046 - DNA, 624 bp, Nicotiana tabacum
agcgtacagctacatggggtccgggtggggttgctttcttcaccctgaaagcaacagtgacgaaaaagcttatatgtgcctatataggataacgcttgagcaatttaatgatgttttacttcaagagaatgtttcgaactttgacatgaactcccctttgtttgacatgactgacttacaatctattgaaaacagcaaatgtgtttcagcagaggctgtcaagaatggctggtaccataatgttctttaccttgggaaggagaatggtcttcctattttgacaatgacatgccgactctcagatattgataacttcaaatcaggtaacgtacttacgtgcaaaccatctaaagaatatgccaataatctgattagagggttggtagaaggaaagcagctctcggaagaggaagccaccacttacatacaagaagcagctagcagagcattgtgagttgtgactacgttttccttcttgtttctttagctgctagataattatgtgactatgcctcacaacatatgctccggaactgttattgtaccattattttttgatgaagcaactgctatcatttttttcagtccaggtgtatataacttataacatctgacatagatgtt

SEQ ID NO: 1047 - DNA, 451 bp, Nicotiana tabacum
cgtcggtacatgaatgcaaaactaagaagctgctctagcgagacatgcgaattcagtggcacatatacagatctgcgtaagcacgctaggcaggagcatccccttgtacggcctacagaaactgacccagagaggcagcgtaattggcggagattggagcggcagagagatttaggagatttactcagtacattgcagtcttctgttggagaagagggaagtgagagcaccagtttaaccttcgatgagggtggtggtttgctgactgtttttctttttgttcggattctccaacctaggagtaattctggtagtaatagctggtcaggctcctcaaggactcgggctcaggcaactggtaggagacgatccttcgagaagactttggggtgagacctatgatgggggataactgaatctagagatgacgacaatgaacagtctgatggaa

SEQ ID NO: 1048 - DNA, 302 bp, Nicotiana tabacum
gttgaaaaaggcgagctctggggccgtcaaaacatctgacgacgatacacaggagaattcaagaaagccgagagaaccatgttctggttcttgttacagagattcaatctttacataactgtgattgaaaatcgatagtgtgaatgatcaccatcaacatgctgacaagataaaacaaacaaacaaaaaaattaaaaaaaaaaataaataaaacctgtcaacagttgaactttgaggtgaagaattagaaaagaaaagagagggctggagttcaaaggagttgcgggcagatccgccgccca

SEQ ID NO: 1049 - DNA, 135 bp, Nicotiana tabacum
cgcacaaagatggaccacgaggagtacctcaagcgagtcaagagctacatcaagacccccacacccgagattgagcagcagctcgaggacttctgcaagaacaccacctatgtgtccggacagatccgccgccca

SEQ ID NO: 1050 - DNA, 446 bp, Nicotiana tabacum
cggactcttccgattacctcccataattgcttccctgcccttgaaattgtataatttaatgtgacatccgttggttttccagtgttcaggaatgaactacttacaacaaaactggatatggttttgagaaagggataatgtcactgcaagggtatttaatgtttcagatctgtggttggaattggaaactaatgttgctgcagctggtatgaacctccatagatttgtttcaagataatgaatgtgctaacgtagagatcaatgtttgacctgtttttctttcttattttctgttttgcccattcctggattgcgtgcttgggtttgcttgctttttgtttctttttccattcaacgtttttgtcctaccattccatgtattgtggacacggttagaaacccaaaacaatattttataatactaaacgaagatacttcgagcaaaa

SEQ ID NO: 1051 - DNA, 309 bp, Nicotiana tabacum
cgtaggtgtagtaaaggttttcgagatcctgtggcccttgtggaacatgttgaaagggaacataaaggaacttctaaggcttagagatggaggtacatgtaaagaagcaaaagtacataatacctttttcttgttaattctttttcataaacaacaagtctatttattcttacactaaattttctcgtgaagaggggatgttctgatggtaagcaacctccacttccaaccaagaggttgtgagttcgagtctacccaagagcaaggtgggaagttcttggagggaaggatgccgagggtctatttggg

SEQ ID NO: 1052 - DNA, 343 bp, Nicotiana tabacum
agcagctcaagaattacagaaacactctgctttcggtttactctttccacgtatgaaggataacgagaaataatctggtttattatgaaacttatcaaattagaatatacaagatgcagcaggcttcagagtaaaaaccaacgaagtccctcctgagagagttgtattttgtccaaagtcgatgcaatgtggtatacatcaaagaagacctctcaagaaagctgtacatccagttgcaatcacagatcaggagggaatatagaaagtttgaacccagtcttctcggtcccttgaggttgcttgtcctttttgtattgtagttcccgggcagatccgccgccca

SEQ ID NO: 1053 - DNA, 311 bp, Nicotiana tabacum
cgggttgttgctttttacttcatatcaatgtgctgtactctgttgtttattggcatcgcgacatgcctttccagttaattggtgccaaggctaaatttatgatcgaggtcattcctctggtaactgcagcagccttgcgtcaccttttggatttcaattatgggtatcctgctctactgctaggctgcaccggatatttctgtgcctatgtgcacttcttgcgcgtagcatatgatattaagggaatagatgtaatgttggggttagtaatgcaaggtcttgcttacatgttgaacgtagaattattagta

SEQ ID NO: 1054 - DNA, 425 bp, Nicotiana tabacum
  misc_feature (277)..(277): n = a, t, c, or g
cggtggtttagaggactttttggaaattcttagggcgttttttggaaacaaagtttatgatgtgaagcatatgatgaggttctgtaatagcctctttggtgggttagaccgagttgcgagtacattggctgtggacagagcggtcggtaaatgccaccaggccggttcagatagcttgttgacgtggcatgcatttcagaaaatgagggatatttatttcgtaaaagacgggccagaaaaacacgctggagtcttgtatggattagaagcttactanggatgaaggggatcactaattgtgtaattgttagtaaataaaagctatttaattcattctttttaattgaaactttggtcctgtgaatttagtttaagtgctattggaaaaggtttaatgagttaaactcctttcatcctaagttcta

SEQ ID NO: 1055 - DNA, 599 bp, Nicotiana tabacum
gtcgaccatatgggagagctcccaacgcgttggatgcatagcttgagtattctatagtgtcacctaaatagcttggcgtaatcatggtcatagctgtttcctgtgtgaaattgttatccgctcacaattccacacaacatacgagccggaagcataaagtgtaaagcctggggtgcctaatgagtgagctaactcacattaattgcgttgcgctcactgcccgctttccagtcgggaaacctgtcgtgccagctgcattaatgaatcggccatacgcgcggggagaggcggtttgcgtattgggcgctcttccgcttcctcgctcactgactcgctgcgctcggtcgttcggctgcggcgagcggtatcagctcactcaaaggcggtaatacggttatccacagaatcaggggataacgcaggaaagaacatgtgagcaaaaggccagcaaaaggccaggaacccgtaaaaaggccgcgttgctggcgtttttccataggctccgcccccctgacgagcatcacaaaaatcgacgctcaagtcagaggtggcgaaaaccgacaggactataaagataccaggcgtttccccctggaagc

SEQ ID NO: 1056 - DNA, 564 bp, Nicotiana tabacum
  misc_feature (76)..(76): n = a, t, c, or g
gatcgcaatcaaatacacttaaatatggcagtgaagatccacgacaaacaacatccaagaaagaggaactcgcgantctcgaacggacctcaactggcaagcaatcgacgatctcgagcgacctcgattcaataccgaaactcaaattgaaactcaaaaattgaaaagcagtaaagggatgaaaacatatattttgtgttagttttttcggatctttccgaaaataaaggactcaaaataaaaacctaaaaccctagctttttctgtcaagaaataccctctttcaatctctgtccagacccaaatatatagccctctctcgaagcttctctccttcctttgcaagaaatagcaaaaacccttcaaaaatccgaaaatcccaccaaaattctgaaaatttccttctttttggtaaaaatctggacaaatggaggggtatgattaattttcattaatcatatcctacccttcgtccatcatctatcgttgaaagagattcacgtatgagagagcaaaatacaacgtagattcgaaccaaaatcggttatttgtcaggccacgtgg

SEQ ID NO: 1057 - DNA, 521 bp, Nicotiana tabacum
cgcatcaattgccattgcttgtccagcattgccttgccttgccatgtctttgcccctgcttgacatggctttgccttgccattgctatgccaatccgcacgtccaagtttaatgcaccttgcttcagttcaaggtgcgtttgtcaaccccgcatagtccgtcatgccgagcagcccatcatgatgttgtcccaattttcaggttgtgtgccaaggccatcatgaaaatccttgtcacaacccacacacttaggttgccagtttgatgatttgttattaccagcgtacaattggtgaagcctcaacgaattgaccaaccagtaaccatttaatgacttcttctggacgtcaatcaaattgctggaaaaaacatcttccatataactgcttttcagaggtgtgattatggtcaaacttgtctcgattggtactatgtttgattgctgaatttgtatgtggaataaactttggtgatgtagattgtagcatcacactgaggtagttgcttgtcagagaaatgat

SEQ ID NO: 1058 - DNA, 471 bp, Nicotiana tabacum
cgggttgtggttatatacttcatatcaatgtgttgtactctgttgtttattggcatcgcgacatgcctttccgtttaattggtgccaaggctaaatttatgatcgaggccattcctctggtaaccgctgcagcgttgcatcaccttttggagttcaattatgggtatctcgctctattagtaagctgcaccggatatttctatacctatgcacacttcttgcgcgtagcatatgatattaagggaatagatgttatgatgggattagtaatgcaggttcttgcttacatgttgaacgtagatttattagttagagctttagttttgagcttctgctttggtatatgtttctatagatacgtgatgtattgtgctcctgaacttcctgctcatgataaaaaggagttggagcagctgccttgttgatttgaattatctgagtataagttaattgagttattttctcttaaaa

SEQ ID NO: 1059 - DNA, 595 bp, Nicotiana tabacum
  misc_feature (447)..(447): n = a, t, c, or g
  misc_feature (449)..(449): n = a, t, c, or g
cgcgttcacaaggaactccagacgatcccatatgcaccacttgttgcgcaggctacaagggctgcaactattatagcgctaatggaacttttatttgtgaaggatcgtctgaccccaaaaatccaaacgtttgtccccagttttgatccagatattgcctattcaaaatgcccgcgttcagaaggatgatgacgataattaatcccaccggatgcactacctgttgcacgggatacaaaggttgctactacttcggtcaggatggcgatgtttgtttgtgaaggatgatgagtgatgaacccaagatgttgtactacggaatgtgaccctagagttgctaccataagttgcccgttttctggattggtaaagattaatcaagaatgcatcaactgttgtaacgcagacaagggttgcgaactctatgataatgatggatctttaatntngtactggtggggagcctcaaagtgctgcttaattatttctaatcagtgatctgtagttattgtacatgaaataaaagcatgatagatatatatatgcactgtcatgctaaactctgtaatgtgggcagtggagatgttttccacag

SEQ ID NO: 1060 - DNA, 421 bp, Nicotiana tabacum
ataattgcttccctgcccttgaaattgtataatttaatgtgacatccgttggttttccagtgttcaggaatgaactacttacaacaaaactggatatggttttgagaaagggataatgtcactgcaggggtatttaatgtttcagatctgtggttggaattgaaaactaatgttgctgcagctggtatgaacctccatagatttgtttcaagataatgaatgtgctaacgtagatgatcaatgtttgacctgtttttctttcttattttctgttttgcccattcctggattgcgtgcttgggtttgcttgctttttgtttctttttccattcaacgtttttgtcctaccattccatgtattgtggacacggttagaaacccaaaacaatattttataatactaaacgaagatacttcgaga

SEQ ID NO: 1061 - DNA, 550 bp, Nicotiana tabacum
cggtcgtactcataaccgcatcaggtctccaaggtgaacagcctctggtcgatggaacaatgtaggcaagggaagtcggcaaaatggatccgtaacttcgggaaaaggattggctctgatgggctgggcacgggggtcccagtcccgaacccgtcggctgtcggtggactgctcgatgctgctcccgcggcgatgatgcgggtcgccgcgtgccggccgggggacggactgggaacggttccttcgggggccttccccgggcgtcgaacagccaactcagaactggtatcggacaaggggaatccgactgtttaattaaaacaaagcattgcgatggtccctgcggatgtttacgcaatgtgatttctgcccagtgctctgaatgtcaaagtgaagaaattcaaccaagcgcgggtaaacggcgggagtaactatgactctcttaaggtagccaaatgcctcgtcatctaattagtgacgcgcatgaatggattaacgagattcccactgtccctgtctactatccagcgaaaccacagcccaagggaac

SEQ ID NO: 1062 - DNA, 395 bp, Nicotiana tabacum
aggactttttggaaattctagggcgttttttggaaacaaagtttatgatgtgaagcatatgatgaggttctgtaatagcctctttggtgggttagaccgagttgcgatgtacattggctgtggacagagcggtcggtaaatgccaccaggccggttcagatagcttgttgacgtggcatgcatttcagaaaatgagggatatttatttcgtaaaagacgggccagaaaaacacgctggagtcttgtatggattagaagcttactaggatgataggggatcactaattgtgtaattgttagtaaataaaagctatttaattcattctttttaattgaaactttggtcctgtgaatttagtttaagtgctattggaaaaggtttaatgagttaaaaa

SEQ ID NO: 1063 - DNA, 422 bp, Nicotiana tabacum
cggtgtttcaattgccatcatgggttgcattgtgaatggacctggggagatggctgatgctgacttcggatatgttggtggtgctcctgggaagattgaccttacgtcggcaagacggtggttaaacgcggtattcaaatggagcatgcaacagatgccttgatccagctaattaaagataacggccgctgggtggatcctcctgctgaggagtaagatcaactggaagagttaacagataacaattgcattgtaaatgcagattctagcacctgataatatatacagcatcagcaaactccagaaagctgccatttccaagcagctgagatgtagctttttatgttgtttgtagaatctagtacatgcatgcaaatgcagaatattcatgtattaatcaattctagttaccagtcccaaaa

SEQ ID NO: 1064 - DNA, 276 bp, Nicotiana tabacum
gcactcagaatctagaaataaaagaagagatcatcagccaagcttgtatggttctcatctataatattcatcctattctgttcttccccatccctatccactgaacctcgatcagactcatcacttgaaatcaacggcacagattgattcacaacctcagatagctgttcctttacattcgacggtggataagaagccacgtgtccatcattcaaatcctccatctcctctaatttgcccttctgctgaccactcgccggacagatccgccgccca

SEQ ID NO: 1065 - DNA, 484 bp, Nicotiana tabacum
cggcggcgacatcggtatccttatggagtacatgaacgtcggcacactagaaagtcttttaaaatcacaagcaactttctccgaacttagcttagcaaaaatcgctaagcaagtacttagcggactcgactacttacacaatcacaaaatcattcacagatgatttaaaaccttcgaaccttctagtaaatcgcgatgatggaagtaaaaatcgccgatttcggatgtgagtaaaatcatgtgcaggactttagatccttgcaattcatacgttggaacttgtgcttatatgatgcccagaaaggtttgatccagacacttatggagttaactacaacggttacgcagctgatatttggagtttgggcttgactttaatggaactatatatgggccactttccgttcttgccacctggacagagaccggactgggctacgctaatgtgcgccatatgcttcggtgagccgcccagtttgcctga

SEQ ID NO: 1066 - DNA, 535 bp, Nicotiana tabacum
cggaagatcagctagaaacacattagaaaaatctcgtactactgggactgaatcaactgtaggggtatcaatactgacatctctctcaaaagctagatacgttttacaccccttctcaaccatacgttgagctttaaggaaagaaataactctactggaagtatgacctaaggtacctctccactctactcacaatacacctggcatagccagcgtcacagttttgccgtgacaatcaaaaatagcataatgggcgacaatcagtccatgcctaagataacatctttaatctaccatgctgagcaataacaaatcgactctggtctcaaaaccactaagagcaaccatacacgaccgataaacgaaacataaacagggaaactcaaagaatctcgagatacacccaaatgcgaggcaaaataagaataagtggagcctggatgaataaatcgatgcatctctatgacaaaccaagacaatacctatgatgacataatggcgatgacagcctcggtacgggcagatccgccgccca

SEQ ID NO: 1067 - DNA, 212 bp, Nicotiana tabacum
ttttgaaactaaaagagttgtctcttataacaacttacagaaatgcttagcaagttcttaggagtacaaaatactagcagaaaacaagaagaatgatcacaacaaatgactaaacaaacacttttcgataaaatgctggataggaagcaggcgactttctgcgtgctgctattgggagcgtcttcacttggtgtagagaacatcttcccatt

SEQ ID NO: 1068 - DNA, 382 bp, Nicotiana tabacum
cccagctgaccgcaagactgcatgcacttgcctgaaatcagctgcttatgctattaagggtattaatatgggcaaagccgctggacttcctagtgcttgtggcgttaacattccctacaagatcagtccctctactgactgctccagggtccagtgaggttgatgaaagacagtttctctacgaacaaatctgaaagtagcgcaatcataataagaagatgatcctgcttatggatccattactatgtatctgttgtctgtttctttttatttgagtcttttcgagtactcatagtcgagtcttgtaacgaaacttcagcggttggttggttttacaatccaatcttgagacttgatatatagatatcttatttagttaaaa

SEQ ID NO: 1069 - DNA, 407 bp, Nicotiana tabacum
tgttgagcaccgtgtatccggcgctgaaaagagattgtttaagtcaccaaattcagaaaaaaacaaggcccgcactcaatttctaaacaagcaaaggatgttgtcccaggacaagaatgttggctactatacggttggtgatgtgtgaaattttcagccaaagccaacctggaacaattgtccgtgtcaaaaatattcattcatagttgcagatttgatgaacaaaatgataaacaaaaggatagttacttgatcattttgttgcctacttggtagtagtcctttatttttcttttacagtaagtatgaattagattggacttggtgcctccacttcatgtagtgcatgaaaaaggccagccactgtgcattctcttatgtttctattgaaacagattctcttaaaa

SEQ ID NO: 1070 - DNA, 456 bp, Nicotiana tabacum
cataactaagatgttctccaacgagatgacattagcttctgcatggattcacttgttggccgtagatctttttgctgcaaggcaggtttatcatgatggattgcaaaatgatattgaaacccgccattctgtgtctctgtgcttgctgttttgccccttcggaattgttactcacttcatcaccaaagctctaaccagtagcccagaaaagagacagcataggactcattaaccaaggatttaggcctttataaatgatcagcctgtgtgtgactatcagcaaagtgcaaaggttttcagcaatgaaacacaacagtagaagcttgtattcttgtaataaaacattgatatagcttgtattcttgtactacaacattgatatactgttgatccaacttcgataaatctaacttgtctctaagatggatgtatgtataagacttcttcctttaaaaa

SEQ ID NO: 1071 - DNA, 540 bp, Nicotiana tabacum
ctaaatctgaagcaaccaatttcgaaagtacatatggtgagccaattccagtgaaagaacttgcggaacgcgttgctagttatgtgcatttatgcacactgtattggtggctcaggcctttcggatgtggggtgattcttggagggtatgatagagatggacctcaactatacctggttgagccttctggtgtctcatacaggtactttggtgctgctattggaaagggaagacaagctgctaaaacagaaattgaaaaattgaagttatcggagatgacctgtcgacaaggggtgattgaggtggccaaaataatttatggagtacatgatgaggcaaaggacaaggcatttgaacttgaaatgagttggatatgtgacgagtccaaccgccaacatcagaaggttcctgatgatattttagaggaagcgaagactgcagctaaagctgcccttgaagagatggatgcagattagtgatcctaatacactaagtactttctttcttcttgcatctgttctcatgtccttattgaatggt

SEQ ID NO: 1072 - DNA, 454 bp, Nicotiana tabacum
ctcgacgtttttcaagcacaaaatgttcagagcaaaggccttcctttaaaattcttaatggtgaattcaagttcagggctagtaattgacgaaaatgaagacataaatatcaaatttgcagcaccaagatacgtgtctatttgcaataaaaccactgtttggaaaattgaagatgggtttgtgaccactggcggaattaagggtgggtctgaaaatggcacggccacaagtttgtttactattcagaagtatgaagatgcctatgcgttacagtattgtccaagagctacagggtgttcttttatttgtccaagattgttgtgtgggtatattggtattgcaccagcgaataatggatcgaggcgtttggctgtcaatcgtccggttttcaagattttattccaaaaggcttagcatacagagggcggactcaagatttttcttaattaaatat

SEQ ID NO: 1073 - DNA, 447 bp, Nicotiana tabacum
aaaagcaaaagcactcaaggctgcctcctccggcttgaaacaaactgggacaaaaaggaagctggacaaccgaacacctgacactgcaggcagaaagaagaaatgggtagaaaatcttaggtcttgtatttgtccacaaagttgttatacatgagatagtgttcattcatatgttcacttctcggattgtggctgtcagtttcatgtagaactaaattgtgtacaacttgccccctcattaaccaaagtttacactattgattctgttttctgtctgagattatctagattgctgttcacaggtagtaaacagtcgtccaaatttcaaagtacccaattgatggcttaatgccattgttaaacttgaaaaaaaaaaaaaaaaaaaaaaatcactagtgaattcgcggccgcctgcaggtcgaccatatgggagagctcccaacgcgt

SEQ ID NO: 1074 - DNA, 411 bp, Nicotiana tabacum
tggacatcaaagatatcagggtggtgataaactatgacttcccaactggaatagaagattatgttcacagaattggtagaacaggccgggcaggagcatctggtctggcctacacatttttctccgaccaggattctaagcatgctttagatcttgttaaagttttagaaggtgcaaatcaatgtgtgccaactgagctacgtgatatggcttctcgcggtggtggtatgggaagggctaggaatcactggggttctggcccaggtggacgtggaggacgtggtggaccctataattccagctatgttggacggaatggaggacatggttatgaccggggatcacgtgacagtgacagatatggtcatggtacctacaatgcggatgctccacggaagcgcagtcgtagca

SEQ ID NO: 1075 - DNA, 503 bp, Nicotiana tabacum
ttttcaagtgcttcagtcattgctaccgtggctgattctgtttttcagaaagccatttccctttacaagaagaggagagaagaaattaaactcgtaaacgatgtgaaatgttcgttttctggtcggctaggtgagtcctatccagcaactaaattagagaattcaagttcagattatgttaaagttgaggagactgctccagtggataatgcgctagcagaagatggttctaagggggctaatctccctgttagttctgaggaagttgtagggctttcacaaaccaccacctgtaacgagctgtgtgagccaatgagtctgaacacagctgagaaatcagatctccctccttccgtggtggaaagagttggcatggacggggataccgttccggatgtggctcaggaaattaaaatggaagagaactcctcgtctctcggagaggtgggtagatctgatgcccctgcacctcaggtatctaaagatttgataatgaccgacat

SEQ ID NO: 1076 - DNA, 422 bp, Nicotiana tabacum
aaattggtgaatctgctgcagaaggagcaattagggaaactctagaagaggcaaatgcagaagtagaggttcagtcaccttttgctcaattagacatccctcttataggccaaacgtacatgatttttttggcgaagctgaaaactccccacttttcaccaggtccagaatcatcagaatgtcggctttatgagcttgatgatattccttttgattctttagcattttcatcaatgctggtgaccttgaagctgtacattgaagatattaaagttggaaggccgaagtttcattatggcatcattaacaagaggcctggtacaagcccttctgaaatccatgcctacactctggattatcatatgcaatcctaacaagcatgtaagttcttttccaaggtcactttcacctaagaaagtaga

SEQ ID NO: 1077 - DNA, 506 bp, Nicotiana tabacum
cggtgcaaaattgtgtgcagtagtagagtcacttaaatttctcgtggacgtatgtgaaattgggcagttagcgccaatcatgctgtccacttctcatatacaaaattcatgcccccttttttgatccccctttttttttttgttgttgggaaatcacaacttttgagtcttgtgaatgggtacccagtccttggcgccaatctgatgaaaagttatgtatatattagatcggtgtgtagtgacagcagctacctttgctgcattatttattttgtgcaagggcatatttccagttttttttttttttttttttttgggcaacaattgtcaaatgaatgtttgctaactatggctgagtacaaatatttgagaaggaaattttctagaacaagacttctaattgaaaccatcagtctgcatgctgttctcatgagctcaactcaataaaaaggctggcctgaggatgtaatccagcatctttaagggacaaagaaagcttctctgcg

SEQ ID NO: 1078 - DNA, 495 bp, Nicotiana tabacum
gacgtttttcaagcacaaaatgttcagagcaaaggccttcctttaaaattcttaatggtgaattcaagttcagggctagtaattgacgaaaatgaagacataaatatcaaatttgcagcaccaagatacgtgtctatttgcaataaaaccactgtttggaaaattgaagatgggtttgtgaccactggcggaattaagggtgggtctgaaaatggcacggccacaagtttgtttactattcagaagtatgaagatgcctatgcgttacagtattgtccaagagctacagggtgttcttttatttgtccaagattgttgtgtgggtatattggtattgcaccagcgaataatggatcgaggcgtttggctgtcaatcgtccggttttcaagattttattccaaaaggcttagcatacagagggcggactcaagatttttcttaattaaatatttataacagatgtgaacttatatgagcaaaagctattagaatta

SEQ ID NO: 1079 - DNA, 307 bp, Nicotiana tabacum
ttttggacgaaatacctattttaaagcaaatgggaaatcacaggaccagaaacagtcagaactatgtcaacataaatgatttaaaaagttgcagcaggacaaaaggaagggaaaaaacaatgatccagaacatgcgagggagtacttgtacaccagcagcagttaataaaattctacagcctcaaacatgtcagtaggggcatactcttgtttcaactgaccattggatcaggacttgatgcagacacaacatccagcagtgagttcacaggctctaattcttcatgccaaagttggagggaatcac

SEQ ID NO: 1080 - DNA, 406 bp, Nicotiana tabacum
taaagctcttactaatgaaccgttaaaattgcttttcttgtagacattacaaacacacttctctctttaaatagaaagtttattacaatggcagagtaatattcttacaaaatagaattcatccatctctttcaggttagtgaaactgaaaccttcaattctaatgatggaaatcatatctccttgcgacattattcgatcaaccaaggttcttgaactggtgtccatgagcacagttcaccttctccaaaccaaagcgctatttcacgcttgccattgtcagggctatcacttccatgcaccgcatttcttccagtttgaacagcaaggtctcctctgattgtgccgggctccgcgttaagtggattagttgctcctatgagcttacgggcagctcctccgccca

SEQ ID NO: 1081 - DNA, 533 bp, Nicotiana tabacum
gcctaatgagtgagctaactcacattaattgcgttgcgctcactgcccgctttccagtcgggaaacctgtcgtgccagctgcattaatgaatcggccaacgcgcggggagaggcggtttgcgtattgggcgctcttccgcttcctcgctcactgactcgctgcgctcggtcgttcggctgcggcgagcggtatcagctcactcaaaggcggtaatacggttatccacagaatcaggggataacgcaggaaagaacatgtgagcaaaaggccagcaaaaggccaggaaccgtaaaaaggccgcgttgctggcgtttttccataggctccgcccccctgacgagcatcacaaaaatcgacgctcaagtcagaggtggcgaaacccgacaggactataaagataccaggcgtttccccctggaagctccctcgtgcgctctcctgttccgaccctgccgcttaccggatacctgtccgcctttctcccttcgggaagcgtggcgctttctcatagctcacgctgtaggtatctcag

SEQ ID NO: 1082 - DNA, 226 bp, Nicotiana tabacum
gtggataaccctcccccagcctagaccaccaaaaagtaggtttacaagctgttgatactggtgggaagaaaatctatggatcaaaaggtgtgtcaagtgcaaccaaagaaggttcactgtcttcaaactgtgttaaaagaagccatcaggggaccccaaatagtagaagctcgaatggtactaccaattctcctgatgatgaaaatgggcatgaactggtgggcta

SEQ ID NO: 1083 - DNA, 426 bp, Nicotiana tabacum
  misc_feature (45)..(45): 3rd Quarter 2005 Request for Annuities Payment Instructions
  misc_feature (45)..(45): n = a, t, c, or g
ttttaggcattaaaaaatttattatataaaatatgaaatgtatanctcaaagaaaaatacgcatatgttgatgaaaagaaaagtagctacttttgttgtgttcggaaacggagagatcctgaaggagtctttccacaaatatgaatgccaaaaaactatagcgtacttacaccctgtattgaatattgaatcagttgaacaaaataaaagtagtagtagtagtagtaaagtccagccgcccaaacacgtggttcgttatgctgatttttaatctgccgcagggaaaaggggacaaaatataaagttttcacttcaccttccatccctccctccccgatgcacacaatgaataaaagaaaaaaactaccgcactctactatgactacatgctgcacttataccccgcccggaatcagttaaacaaaa

SEQ ID NO: 1084 - DNA, 312 bp, Nicotiana tabacum
agtaacaaataagagtctaaacagtagtgcttgattttatctcatgcactcatgtgagttttcttcacgttgtatgtttgaagttgtgtaagggcagtgtgctgactctgtgtatataggcggccatgcccgcttctgtgtattaagaagaaagtgagtttactactccatatcaggacgcaggactgcttctatgcgtggaaagcgatggtgtgcatatgtatcttgttaaggtgttgtatgtggtgtcccatgtgtaatgctgtactctttggatctaatatatgagtttaagtattgtgttatacaaaa

SEQ ID NO: 1085 - DNA, 371 bp, Nicotiana tabacum
caaagaaaaatacgcatagttgatgaaaagagaagtagctacttttgttgtgttcggaaacggagagatcctgaaggagtctttccacaaatatgaatgccaaaaaactatagcgtacttacaccctgtattgaatattgaatcagttgaacaaaataaaagtagtagtagtagtaaagtccagccgcccaaacacgtggttcgttatgctgattttaatctgccgcagggaaaggggacaaaatataaagtttcacttcaccttccatccctccctccccgatgcacacaatgaataaaagaaaaaaactaccgcactctactatgactacatgctgcacttataccccgcccggaatcagttaaacaaa

SEQ ID NO: 1086 - DNA, 349 bp, Nicotiana tabacum
gatatttcaagccggagacggtttggcaacgaaatgggcggacaagctggtgctcagcatgtgcagccaatgccagttgaaaatccaagtaaaagagtttactgttctgtggtggagtgaagcccaggggttggtagctattgtgcttcaagcaatcaatgagtatagtcattactgttgccgatggcaatgacgtatcaggaaatagacacacaataaacgagaacagaatggggaaaggaattatactggcatttaagctggcagcttgattttgttgggatatgaattttgttttgtcagggataagtattttcttttccttttatgttatgttgttcctccaaaa

SEQ ID NO: 1087 - DNA, 193 bp, Nicotiana tabacum
agtaggtgcatgagcgtaagatggagaaagctcgaaagcaaaacgctgtaggatcattgctaaggcaatcttagtttccaacattgcaaaattattaccaatgcaaatacgaggaccccaactgaaaggcaagaaacaaagtctgttctttgttgctgttgcaattccctcagcaaacctctccggcttgaaa

SEQ ID NO: 1088 - DNA, 327 bp, Nicotiana tabacum
ttcaagccggaaaggttcgcccaggaagacaaggagaagagagatgccatagacacaaagaaccaggccgattctgttgtctaccagacagagaagcagctgaaggaacttggagacaaagtaccagggccggtgaaagagaaagttgaggctaaacttggagagcttaaagaagcgatctcagggggctcaactcaaaccatgaaggatgcgatggcttctcttaaccaagaagtaatgcagcttggtcagtcactctacaaccagcctggtgctggagctgcaccaggtgctggtccggcacctggcgattccgctggtccttca

SEQ ID NO: 1089 - DNA, 453 bp, Nicotiana tabacum
aaatcatatcaaacaacgctaaaatcatgaatcggcctccaatccaagcttaatgaactctaaaatttcaaaccttctactttcggtgcttaaacctatcaaatcacgtccgattgacctcaaatttttcatacaagccatatttgacattgcggacctagttcaacttccggaatcgaaattcgaccccgatatcaaaaagtccactaccagtcaaacttctcaaaaaccttcaaatttctatatttagctaaatgactccaaaatgacctacggatctccgaattcacttccggtcgcactcccaatcccagaatcaccatacggagctattcccagactcggaatcctgaacggacattgataacactgaaatgcacttcaacccaaacttatgagattcttccaaaatgctaactttcacaataggcgccgaaccgctccggcttgaaa

SEQ ID NO: 1090 - DNA, 341 bp, Nicotiana tabacum
tacaacaacagtacaaacccagtgagatcccctactttagtgaagatagagacacctcggctcaagaaaggaaaccacgccaattttgtcgtggaatacaaacagcctccaaaggtttatctttgttcaaagtgattctagaattatagcacgcgtccaacttttcttcttccacacttttccaatcgaacgactgaatcagggaacccaataccagtgaaacagtgcgcaagcccatagcagctccagggcatgctcttctccccattccaaatggtactaatttatagttgaatccttctttttctccttccatggcctcaaaccgctccggcttgaaa

SEQ ID NO: 1091 - DNA, 241 bp, Nicotiana tabacum
ctctaatgttattatttctgaagatataactgcattatgacatacatacatacatacttttgtgttcactactaaaatcactttcaagcaaaataaaagatacaagatttaagttggataagtagacgataccattacaaaagatttaaagcacgagttcaaacataacaaagagtctatcttgatggaaccacagaagtgctgaatcaaacagagtaaagtttaggtgaaagtcttggct

SEQ ID NO: 1092 - DNA, 122 bp, Nicotiana tabacum
atagcatgtaactagaatattgaaattgataggtgtacgctgcaacactgaaaggtatattgatgactatatatataaaacatcaggtcaaattaatatgctgtcaaactagtagaggaact

SEQ ID NO: 1093 - DNA, 173 bp, Nicotiana tabacum
gaggttgtttggagttaatcgaagtgcaagtttcgttcgccgattcaaggtttgtttgcgattcgggtcgatttatgtggcgatttcacgatttggagttggccgttgaatctacactcatttgtttcttctgattctgttaaaagttattcgtacatcaacaggtctgttaa

SEQ ID NO: 1094 - DNA, 181 bp, Nicotiana tabacum
  misc_feature (5)..(5): n = a, t, c, or g
  misc_feature (9)..(9): n = a, t, c, or g
  misc_feature (10)..(10): n = a, t, c, or g
gactngcannggccgccatggctgccgcgggaatcgattacacacaagtatttatgtatgtatgttataatgcagttatattttcagaaataataacatacatacataaatacttgtgtgttcactattaaaaccactttcaagcaaagaaaaagatacaagatttaagttggataagtag

SEQ ID NO: 1095 - DNA, 264 bp, Nicotiana tabacum
ggtcgaccatatgggagagctcccaacgcgttggatgcatagcttgagtattctatagtgtcacctaaatagcttggcgtaatcatggtcatagctgtttcctgtgtgaaattgttatccgctcacaattccacacaacatacgagccggaagcataaagtgtaaagcctggggtgcctaatgagtgagctaactcacattaattgcgttgcgctcactgcccgctttccagtcgggaaacctgtcgtgccagctgcattaatt

SEQ ID NO: 1096 - DNA, 243 bp, Nicotiana tabacum
ggcaatgttaaggctaagattcaggacaaggaaggcattccaccggaccagcagcggttgattttcgcaggtaagcagcttgaggatggccgaacactagctgactacaacatccagaaggagtccaccctccatcttgtccttcgcctccgtggtggtgcaaagaagcgtaagaagaagacttacactaagccaaagaaaatcaagcacaagaagaagaaggttaagctcgccgtcctccag

SEQ ID NO: 1097 - DNA, 189 bp, Nicotiana tabacum
ttcaagccggagcggttccgcactataacaagtagttactatcggggagcacatgggattattattgtttatgatgtaacggaaatggagagcttcaacaatgtcaagcaatggttgaatgaaattgacagatacgcaaatgagagtgtttgcaagcttctggtgggaaacaaatgtgatttggtagaa

SEQ ID NO: 1098 - DNA, 202 bp, Nicotiana tabacum
gtttggcaacgaaatgggcggacaagctggtgctcagcatgtgcagccaatgccagttgaaaatccaagtaaaagagtttactgttctgtggtggagtgaagcccaggggttggtagctattgtgcttcaagcaatcaatgagtatagtcattactgttgccgatggcaatgacgtatcaggaaatagacacacaataaacg

SEQ ID NO: 1099 - DNA, 466 bp, Nicotiana tabacum
ttcaagccggaaaggttccaaagttataattcaatccaaattctttttaccccaaatcctgttcaagtccttccgatcgttcaaaataggaggatacagttagttggatccgatacaacaaaatgagagaaatgaaatgagagagtcttattggtgaaaacccacacaggcaccgtgaggcgacagtaagcagagaaactagaaatgagagagtcttgttagtgaaaactcacaaagagcactataagacgatagtgagaagagaaatgggagtggtcagctagtaaaaacccgcaaagggcgcccctgatcgaaaagaagatcctcacagccatcggcatcgacagagtcttggcaaggtctctcgattttgaggcaaaagttgtggtgaatttctaagagtcaaatggtttacacaggatcagacatccagtccaaaaggcatgtcaagttcattgaagtccaa

SEQ ID NO: 1100 - DNA, 459 bp, Nicotiana tabacum
ttcaagccggagcggttcggactccgctagagcggtggtggagaggtcgctgaagctgttggaaacggtggcgacgtgtacggaaggcagggcggcgatagggaagggcgaggagtgcttgacggcaatagttacgagactcatgaagagctcgagagctgcgacggagcacggcgtgacggtgctgtggagcgtatgttgtttggcgcgtgatacggcggcgcgtgaggttatagggagggtcaatgggctgaccaaggtgttgctggtgatgcagagtgattgctccaccggcgcacggcagatgtgtggggaattggtcaaagcattgcgagtggtgaataataataatagtaagaattattcaaagtcgtgtttggcgagttatgataccaagactactcacatcatgccctactgaaaatatttattaaattaaatgccactcctaattgtata

SEQ ID NO: 1101 - DNA, 432 bp, Nicotiana tabacum
ttccgcactataacaagtagttactatcggggagcacatgggattattattgtttatgatgtaacggaaatggagagcttcaacaatgtcaagcaatggttgaatgaaattgacagatacgcaaatgagagtgtttgcaagcttctggtgggaaacaaatgtgatttggtagaaaacaaggttgtggacacacagacgggaaaggctctggcagatgagctaggtatccctttccttgagacgagtgcaaaagactccattaacgtggagcaggctttcttaacgatggcgggagagatcaagaaaaaaatgggtaatcaaccagctggagccaagaagacaggtagtactgttcaaatcaaaggacaaccaattgagcagaagagcaactgctgtggctaactgctgacgctgtgcttctgtatccctcta

SEQ ID NO: 1102 - DNA, 570 bp, Nicotiana tabacum
gttccgaacaattacaacagcttactaccgtggagccatgggtatcttgctggtatatgatgtgactgacgagtcatcgtttaacaacatcaggaattggatacgaaacattgaacaacatgcttctgacaatgtcaataaaatactcgtgggaaacaaggcagatatggatgaaagcaaacgggctgttcctacatccaagggtcaagcgctagccgatgaatatggcattaaattctttgagacgagtgccaagacgaatatgaatgttgaggaggttttcttttcaatagctcgggatataaaacaaagacttgctgaatctgacaatagagccgagcctcagaccatcaggattaatcaacccgaccagggagcaggaggtgctcaaactgcccaaaaatcagcttgttgtggttcttaagaaattggcagtaacgaagataggatgatgagggaggaggaattaatcttttccatgacgttaatgtttcttcacaatctatttactttctcgaagctcctactatgtctaaaattataatctaagtcttgcttattatttatatc

SEQ ID NO: 1103 - DNA, 263 bp, Nicotiana tabacum
atcaaaaggctcaattgacagcacatatgcttagacatcattgcatacactccctgagaaagatcacatgattgtccctctcaagttccatcctctaatctcacagtaaagacggttgtaaaagcagctatatgagagaaatgattatccaaacaccagttgcactaacaaacccaacctaacacggaatgcacttcaaattttctaaacaagccatagactttaccctgcccatctaggacccgaaccgttccggcttgaaa

SEQ ID NO: 1104 - DNA, 348 bp, Nicotiana tabacum
gtatattgatgactatatatataaaacatcaggtcaaattaatatgctgtcaaactagtagaggaactgaattcctcggatagcatattctcacaggactacagcctgtgcattattaggggagcaccatatttgggtttcaaagtgaccacagtgtatggagagtgtgtataagatggagagagctcgaaggagaagcgttgtagaatcatagctatagccatttttgcttccaaaatcgcgaagttttgcccaatgcattttcgcggtcctgcaccaaatggaaaatatgtcattttcccctttgttgcctttgccaccccttcgctaaacctctccggcttgaaa

SEQ ID NO: 1105 - DNA, 245 bp, Nicotiana tabacum
agaacagatgtgacaagtgcaattctgctggatgtgcaaaggatgagaacgcagagataggaatatttacaggactaaagaaccataaaaactctaaaatatttcagatcaatgctggttcgaaaagaatttagaaaggaaatctttgggtttcggttcctgggtgtctttccagcgcatcatcatgtgacccttttgctggtagtaagctgcagtttccttcaactccatcatgaagtgtgaca

SEQ ID NO: 1106 - DNA, 391 bp, Nicotiana tabacum
tccgaacaattacaactgcttactaccgtggagccatgggtatattgctggtgtatgacgtaactgatgagtcatcttttaacaacatcaggaactggataagaaacattgagcagcatgcttccgacaacgtcaacaaaattctggtcggcaacaaggctgacatggatgaaagcaaaagggctgttcctacatcaaaaggtcaagcactagctgacgaatatggcattaaattctttgagacaagtgccaagacaaatatgaatgtggaggaggttttcttttccatagctcgggatataaagcaaagacttgctgaatctgactcaaaggctgagcctcagactatcaggattaatcaaccagaccaggcagcaggagcttctcaaag

SEQ ID NO: 1107 - DNA, 346 bp, Nicotiana tabacum
attccattttgtcctattcagcaatgccatttaggctaaattttcaattgacagcaagacaagggacaaaagatgagaagtttctggattagggggaatgagggagagagaagacacaaaggctacttacaatagttctgaaaacttaactagtttctaaaggaaataaagaaaaagattaatagatgaggcaagggggaaagaagaagaaaaggcaaggataaaaaggaaacaccatatatatgcagagaatatgtaaagatcaaagagcacaagttggaggattcacaagggattgtgacatacagcaactgacattacttcaactccatcatgaagtgtgaca

SEQ ID NO: 1108 - DNA, 327 bp, Nicotiana tabacum
cgatgaagagatcgaactagttgtcaaaactactgaaatagctggagttgtcagtgagggataaataacttttctcgcttgttttggactttctggaattgctcgaacaaaactagagtgagtttccaagcttttttgtccattggcgatttcctcttcgagaatatcgtctccttcttgtccactctcactgatatcttcagactgacggagtcttaaaggagagctgttgacaggtttcctttcatttggaggtagatttaattcttggttattattaggtatctgggggtaactaaaaggtttgggaaccgctccggcttaaaa

SEQ ID NO: 1109 - DNA, 424 bp, Nicotiana tabacum
gttcgcccaggaagacaaggagaagagagatgccatagacacaaagaaccaggccgattctgttgtctaccagacagagaagcagctgaaggaacttggagacaaagtaccagggccggtgaaagagaaagttgaggctaaacttggagagcttaaagaagcgatctcagggggctcaactcaaaccatgaaggatgcgatggcttctcttaaccaagaagtaatgcagcttggtcagtcactctacaaccagcctggtgctggagctgcaccaggtgctggtccggcacctggcgattccgctggtccttcagaatcatcatcagggaaaggacctgatggagacgtaatcgatgctgatttcaccgacggcaagtgagcatagaagagcaattttgaggctatatttacttttcagcttata

SEQ ID NO: 1110 - DNA, 461 bp, Nicotiana tabacum
gttccgcactataacaagcagttattatcggggaagcacatgggatcattattgtttacgatgtaactgaaatggagagcttcaacaatgtcaagcaatggctgaatgaaattgacagatatgcaaatgagagtgtttgcaagcttctggtgggaaacaaatgcgatttggtagaaaacaaggttgtggacacacagacgggaaaggctttggcagatgagctaggtatccctttccttgagacgagtgcaaaagaccccattaacgtggagcaggctttcttaacaatggcgggagagatcaagaaaaaaatgggtaatcaaccagctggagcgaagaagtcgggtagcactgttcaaatcaaaggacaaccaattgagcagaagagcaactgttgtggctaactgctgacactctgtttctgtatcgctctgttcccaattgcaaaatgtgaacagcta

SEQ ID NO: 1111 - DNA, 329 bp, Nicotiana tabacum
gtttggcaacgaaatgggcggacaagctggtgctcagcatgtgcagccaatgccagttgaaaatccaagtaaaagagtttactgttctgtggtggagtgaagcccaggggttggtagctattgtgcttcaagcaatcaatgagtatagtcattactgttgccgatggcaatgacgtatcaggaaatagacacacaataaacgagaacagaatggggaaaggaattatactggcatttaagctggcagcttgattttgttgggatatgaattttgttttgtcagggataagtattttcttttccttttatgttatgttgttcctccaaaa

SEQ ID NO: 1112 - DNA, 435 bp, Nicotiana tabacum
gtgtgcaagtggaatcatggaagctattgccatttggaatgggaaggagagcgtgtccaggttctggacttgctcaacgtgtggttggtttagctttagcatctctagtgcagtgttttgagtggaaaagggtaagtgaagaggtggttgatttgactgaaggaaaaggtctcaccatgccaaaagctgagccactcatggctaggtgcgaagctcgtgatattcttcacaaagttgtttcagaaatatcctaacgtttcagagtgtttcttgcatttttttagtgctccatacctctagtttttaggttagaaaggtttgagtaataaagcaccatgtgtcttcattctctcatataatatgtgctatgtaagtttctgatttgttacttagatactttggattaaatatatgaggtgctacttctttttaaaa

SEQ ID NO: 1113 - DNA, 301 bp, Nicotiana tabacum
gttctactaggaaataaagtgaaatgtgcagatggcaaggcttgtacacggaattgcgatccagatgtagcttacatggtttgcccatctactcgacaaaagattactaaaccatgtgtcaactgttgctcagcaaaaaaaggttgcaagcttttccgcagcaatggatctgtaaaatgtactggaacttagcttttgtccattattaataagctagctacaaggccactacttaggatatctgtgcaataaggcttgacaatatataagttctcacgtgtgatttgtactatatattgag

SEQ ID NO: 1114 - DNA, 123 bp, Nicotiana tabacum
aaaagaatttagaaaggaaatctttgggtttcggttcctgggtgtctttccagcgcatcatcatgtgacccttttgctggtagtaagctgcagtttccttcaactccatcatgaagtgtgaca

SEQ ID NO: 1115 - DNA, 223 bp, Nicotiana tabacum
  misc_feature (38)..(38): n = a, t, c, or g
ttttaggcagaaagcgaaattctaccattcaaacatanaaatcacaacaaaattaatatgtacacataattatgatcctccttaacccaaaacaacatgaaaaaacacattttttttgtttcattttcttttcactagatcaatttactactactacataattactaaaacgatggaacgacgccgtatgaagcgtcggaggagccatggtggcgtctagaga

SEQ ID NO: 1116 - DNA, 325 bp, Nicotiana tabacum
aggtcatcaccattggcaatgggaaggtaaacctggcagattccaatgtccgtccagttgaggtattcatgtgcagcatagtccgcaaaatgggatatggagaaggcttcagatggatgtctcagtatatcaagtaatgggtctaggaagtgacattttgtaattctgttttaatttatacttttgtaccggataaattgaagatgtttgtttatcactatgggctatagtttctcttgttctaggtttctagtgaaaacagtaaaagaagtattctctactatattgtctagtcttcaattgttatagaaatataatgatggta

SEQ ID NO: 1117 - DNA, 359 bp, Nicotiana tabacum
  misc_feature (181)..(181): n = a, t, c, or g
  misc_feature (247)..(247): n = a, t, c, or g
  misc_feature (252)..(252): n = a, t, c, or g
  misc_feature (296)..(297): n = a, t, c, or g
  misc_feature (310)..(310): n = a, t, c, or g
  misc_feature (351)..(352): n = a, t, c, or g
gtcacacttcatgatggagttgaaggtatctgctaagcggacaaatgttcctggtttgaagcaatttcgaggaaggcgattcaacccttatgcaggatttcgccctcggcgtccattcatgcctggtgctccagtctttccaccttttggaaggattccaaggttcagacgccccacccgnctacaggccatactagtggattttagtccggattgcatggccttcccgaggaaagcattggggctncccgntagggagagacgtgtctccttgttactcctctttggtttccttnnggggagtgcaaangatgttatagttcaaattttcctgtaccatttaagttaaannggctgaa

SEQ ID NO: 1118 - DNA, 249 bp, Nicotiana tabacum
taaagaacagatgtgacaagtgcaattctgctggatgtgcaaaggatgagaacgcagagataggaatatttacaggactaaagaaccataaaaactctaaaatatttcagatcaatgctggttcgaaaagaattagaaaggaaatctttgggtttcggttccctgggtgtctttccagcgccatcatcatgtgaccccttttgctggtagttaagctgcagttcttcaactccatcatgaagtgtgaca

SEQ ID NO: 1119 - DNA, 425 bp, Nicotiana tabacum
ctgcaggtcgaccatatgggagagctcccaacgcgttggatgcatagcttgagtattctatagtgtcacctaaatagcttggcgtaatcatggtcatagctgtttcctgtgtgaaattgttatccgctcacaattccacacaacatacgagccggaagcataaagtgtaaagcctggggtgcctaatgagtgagctaactcacattaattgcgttgcgctcactgcccgctttccagtcgggaaacctgtcgtgccagctgcataatgaatcggccaacgcgcggggagaggcggtttgcgtatgggcgctcttccgcttcctcgctcactgactcgctgcgctcggtcgttcggctgcggcgagcggtatcagctcactcaaaggcggtaatacggttatccacagaatcaggggataacgcag

SEQ ID NO: 1120 - DNA, 346 bp, Nicotiana tabacum
tttaattgaacaaggaatgaaataccatactcaatatatagtacaaatcacacgtgagaacttatatattgtcaagccttattgcacagatatcctaagtagtggccttgtagctagcttattaataatggacaaaagctaagttccagtacattttacagatccattgctgcggaaaagcttgcaacctttttttgctgagcaacagttgacacatggtttagtaatcttttgtcgagtagatgggcaaaccatgtaagctacatctggatcgcaattcccgtgtacaagccttgccatctgcacatttcactttatttcctagtagaaccgctccggcttgaaa

SEQ ID NO: 1121 - DNA, 200 bp, Nicotiana tabacum
accaaaaaatgacatatctttcttagtcatccttcccccaatggaatgagcacaacaaggtactaataccaccattagaaggaaaaaaaactaaggaagatgtgccaaaatacaagttacatattattctatgtattatctctaacaaatctcataaatccttcaaggttcggaggaggccatggtggcgtctagaggca

SEQ ID NO: 1122 - DNA, 346 bp, Nicotiana tabacum; identical to SEQ ID NO: 1107

SEQ ID NO: 1123 - DNA, 213 bp, Nicotiana tabacum
gtcgcatgcctacaggaacaggtggtggcggcggcggttatggaggtggccgtcgtgaaggtggttacggtggtggctctgaaggaaactggaggagtcagatttccccgttgcctttagatttattttctttggtttgaaatttatggttcctaagttttggttgaagtacccgttatggtttactgtggttcctgctactgtcctcgtttt

SEQ ID NO: 1124 - DNA, 447 bp, Nicotiana tabacum
ctgcaggtcgaccatatgggagagctcccaacgcgttggatgcatagcttgagtattctatagtgtcacctaaatagcttggcgtaatcatggtcatagctgtttcctgtgtgaaattgttatccgctcacaattccacacaacatacgagccggaagcataaagtgtaaagcctggggtgcctaatgagtgagctaactcacattaattgcgttgcgctcactgcccgctttcccagtcgggaaacctgtcgtgcccagcctgcattaatgaaatcggccaacgcgcgggggagaggcggtttgcgtattggggcgctctttccgcttcctcgcctcactgactcgctgcgctcggtcgttcggctgcgcgagcggtatcagctcactcaaaggcgtaatacggttatccacagaatcagggataacgcaggaaagaacatgtgag

SEQ ID NO: 1125 - DNA, 436 bp, Nicotiana tabacum
gatcatttgatcaagttacatgtattcacactcattaacgtaaaaaaaataaatggaaagaacaaatacattggaccccattcttgcaattggtcctattacatccatggtccaatgggaccaatttgaggatcagaattaaataaaaggtgcaattagttcatgaaaaagatgggaatcgagtgcacctctgtgaaaggaacactttacaatcatcctttggagcaatggttggaatatacgcgatatcatcacagccgtccgttttgtgcctcttgaaatcaatcagagccgtgaacaacgcaataaagagcatcaaatggtttatagcatacctctgtcccacacatccatggggcccagctccaaatgctagataattcttcttgtaaacccgttcctcttgcctctcctctgtgaaccgttccggctcaaa

SEQ ID NO: 1126 - DNA, 561 bp, Nicotiana tabacum
gctgaaattttattattagtttcaacaactattacattcagcttgaaaaggcccttagtaaggtaacctttttcctacaaacatttcattcttactaatcactaccttgtcagatacaaaaacgcacttgaaaccatgctttacaagaagtccagtaaagactaagttcttcctaatctcgggaacatgaaggacgttgttcaaagtcatgaccttgccagaagtcatcttgagaaatatcttaccgtatccttcaatgtttgttgtagcagcatttcccatagagagcttctcttcgggtccagcagaagcatatatagaaaatacttccctcacggcacaaacatggtgagtggctccagaatcaatccaccactcctttgggtttcctaccaggttgcattcagaaagcatggcgcacaagtcatcaacatcatcatgcttttctaccatgtttgcttgacccatttgcttgtctttcttccgagcacaacacttcgtagattgtgtccggttttcccacagttgtagcagtttccactgaaccgctccggctcgaaa

SEQ ID NO: 1127 - DNA, 351 bp, Nicotiana tabacum
agttcgagatgctgctagggaggctgctcttcgtgaaatcaaggaaagaatcaagaagacaaaggatgaaaagaaggctaagaaagcagaggtgatggcaaagtcacagaaaggtggagggaaaggtaatgtgtcaaagggagctgcaggaaaaggccccaagcttggtggcggcggtggaaaacgttaagctattgtttatgtttgtgtttctaagtagtactagaatggttttgcatcttgattgaatgtaagtttttgatccaactgcagatcagcagttcaaacaaatatatttctgaattttggtcttgtttcaaatatgcagattaattactcttgttcccaaaa

SEQ ID NO: 1128 - DNA, 435 bp, Nicotiana tabacum
tccaaagttataattcaatccaaattctttttaccccaaatcctgttcaagtccttccgatcgttcaaaataggaggatacagttagttggatccgatacaacaaaatgagagaaatgaaatgagagagtcttattggtgaaaacccacacaggcaccgtgaggcgacagtaagcagagaaactagaaatgagagagtcttgttagtgaaaactcacaaagagcactataagacgatagtgagaagagaaatgggagtggtcagctagtaaaaacccgcaaagggcgcccctgatcgaaaagaagatcctcacagccatcggcatcgacagagtcttggcaaggtctctcgattttgaggcaaaagttgtgatgaatttctaagagtcaaatggtttacacagatcagacatccagtccaaaaggcatgtcaaga

SEQ ID NO: 1129 - DNA, 311 bp, Nicotiana tabacum
tccaaagttgtagttcaatccaaactcttgttacccaaaaccctattcaaaggccttcaaatcgatcagtaaagaagttcacaatgggaggttgttggatccaatacaatcaaatgagagaaataaaatgagagagtcttattggtgaaacccacacgggcatcgtaagacgatggtgagatgagaaattgaaaatgagagagtcttgttagtaaaaactcgcaaagagcactataaggccacggtaagaagagaaatgagagaggtcaattggcaaaaacccgtaaagggcgccattgatcgaaaagaag

SEQ ID NO: 1130 - DNA, 529 bp, Nicotiana tabacum
tcctacgattggataggaatgcaattctggaagcaaaacccataaaagggactatagctcgtggttccacccctaaagaagatgaatttctgaaactgcaattagaatacagtgaaaaggatcaggcggaaaatttgatgattgttgacttgttgaggaatgacctcgggcgtgtgtgtgagcctggctctgttcatgtcccacatctcatggaaatcgaatcctatgcaacagttcacaccatggtcagtacgattcgggggaaaaagcgatcagacgtaagtgcaattgattgtgttagagctgcatttcctggcgggtcaatgacaggtgcaccaaagttgagatcgatggaacttcttgatcatcttgaaaattgttccaggggcatctactcgggctgcattggatttttctcttataaccaagcatttgatctcaacattgtgatacggactgttgtcatacacgaagagaagcttcagtaggagcagggggagccattacagctctttcagacccgatgata

SEQ ID NO: 1131 - DNA, 293 bp, Nicotiana tabacum
acgtgagaacttatatattgtcaagccttattgcacagatatcctaagtagtggccttgtagctagcttattaataatggacaaaagctaagttccagtacattttacagatccattgctgcggaaaagcttgcaacctttttttgctgagcaacagttgacacatggtttagtaatcttttgtcgagtagatgggcaaaccatgtaagctacatctggatcgcaattccgtgtacaagccttgccatctgcacatttcactttatttcccagtagaaccgctccggctcaaa

SEQ ID NO: 1132 - DNA, 278 bp, Nicotiana tabacum
atggcataccgccacccctagccttggagtaggacacatagtagaactgggagattatgctggtgaagaaaatgaaagctgctccagctgcaaaaactccttttctcagagtttcacaagatagaggcttgtcgttaatcaagtatgatgatcggtacttggtgtgataagcattcctaactgaaccagccaacaagcagacctcagcaatgaagaatgtaacccagcatatgatgaacaagagaacagcacaagcccttgaacctctccggctcgaa

SEQ ID NO: 1133 - DNA, 322 bp, Nicotiana tabacum
acggttcaagcacttcagtattcagtagatatttgaggaggagcagtagaacttgggtaccggaagagagtaatggagtaaccagatggtaattattttggaaaaaaatgaaaaatatatcaattttcaattattatttactgagcaaaagcactaagaaaacagaaaaatcgtcatagagcagtcgattagaggtcgaacacaacttatcgagaaatatggcataattatctcgaggattatctatcgagtttcaaacagttggcgagacgattttcggtgataagagaattattgtataatttttctaatttatcttgga

SEQ ID NO: 1134 - DNA, 403 bp, Nicotiana tabacum
tctatagcacttacagttattcagtacatatccgaggaggagcagtagcaacttgggtaccggaagagagtaatggagtaaccagatggtaattattctcggaaaaaaatgaaaaatatatcaattttcaattattatctactgagcaaaagcactaagaaaacagaaaaatcgtcatagagcagtcgatcagaggtccgaacacaacttatcgagaaatatggcataatttctcgaggattatctatcgagtttcaaacagttggcgagacgatcttcccggtgataagagaattattgtataatttttctaatatatcttgggtacatttatgtgacaatgaaatgtacaaagttggccattttggaggaaatctgtataatagagaacgctttcgatctg

SEQ ID NO: 1135 - DNA, 82 bp, Nicotiana tabacum
ttgcaaaaatggccatagagttgttaggctactcgcaaataaatgagcaattagctctacaagaagcagcttcagccggttt

SEQ ID NO: 1136 - DNA, 361 bp, Nicotiana tabacum
acggttcaagcacttcagtattcagtagatatttgaggaggagcagtagaacccgggtaccggaagagagtaatggagtaaccatgatggtaattattttggaaaaaaatgaaaaatatatcaattttcaatcattatttactgagcaaaagcactaagaaaacagaaaaatcgtcatagagcagtcgattagaggtcgaacacaacttatcgagaaatatggcataatttctcgaggattatctatcgagtttcaaacagttggcgagacgattttacggtgataagagaattattgtataattttcctaatatatcttgggttcattttagtgacaatgaaatgtagaaagttggccaa

SEQ ID NO: 1137 - DNA, 290 bp, Nicotiana tabacum
ccaaaagaactgatgtgaaaaaactgaaattatctgacctgcgaaggtgagcaaagtaaaccagatgcatctgctcctacaactgcaagatcgcaaacagtacaaagctgtccttgctgtgctggaacaaaatcagtagcacaataagggcaagtgacatccttctggcctctgtatatggggacatatgttgcgccacagaccacaaacggatttctgaagtcataattcaactgtgtagcatctcgcatatttttctcagcttgttgcagaacctctccggctcgaaa

SEQ ID NO: 1138 - DNA, 198 bp, Nicotiana tabacum
tcttaatggagggatcagataaagaaggtttcgatataacaggaagtagagagatcaagatgatgccatttggcgctggtaggagaatatgcccaggctatgctttggctatgcttcatttagagtactttgtggctaatttggtttggcattttcgatgggaggctgtggagggagatgatgttgatctttcagaaa

SEQ ID NO: 1139 - DNA, 216 bp, Nicotiana tabacum
tcgggatgccgctaataaccaacgaatggcaagtcgttgataattttgtcagcagccaattgttctcgaatggggccattcaaggatgtaaagtatcacggaacttcttagaaaagctgcgaagacgggactagtttcaagcagaatccgaataaagaaaaaggcagggtcggagcagacgtcagtaagtgaaagatgcctccaggaggaatccta

SEQ ID NO: 1140 - DNA, 431 bp, Nicotiana tabacum
tggtgtaatatcagtgacattattgtgaacttatcaaaaatgtccaatgatagtgaaaagaagaaatacaaaataatcatgcatttttctttacatagtagctcggatagccagggtagaaggaaatccttaccagtatccagaacccaaaaatcccctaaccttctactgccagatctcccaccaaagatgaacatatgacagtcaattgatacagcaacgtggaatgctcgtgggctgggacccacttggccatcagaaccactgcctgtgcactctggctgaaaccacaatttgttttcaatgtcatagacagtgatgtcattaaggaacttcttgtcaagtagtcctccgaacaccacaactttcgatttcccaatgttcactgcagtgtgtccacttcgaggttgtggaaccgttccggctcgaaa

SEQ ID NO: 1141 - DNA, 332 bp, Nicotiana tabacum
gaagtaaggtctctctcctataaggctggggggatccttcgacacagcagatatgataagactctctcagatcaaaaggctcaattgacagcacatatgcttagacatcattgcatacactccctgagaaagatcacatgattgtccctctcaagttccatcctctaatctcacagtaaagacggttgtaaaagcagctatatgagagaaatgattatccaaacaccagttgcactaacaaacccaacctaacacggaatgcacttcaaattttctaaacaagccatagactttaccctgcccatctaggacccgaaccgttccggctcaaa

SEQ ID NO: 1142 - DNA, 368 bp, Nicotiana tabacum
ttacttgatcaacacaataatactttcagcttcaactgaaacgtttatctttctatatgaaactaaatatccagtgacaatcaacttagggccgcaacagattatatacactccagccctgctgcgtgcccaaagaaaagaagatgcacaacttggatccatgcaagttttggttcatatcaaaatgatggaagtcaccaatccatctccataccatgccatgtggtcatctcaaagggacaaccgataggctcatgcactaactatctatgtatgaattgggagagcacatgcaagagaagcatgatttccctccttgtatacaagatttccgcgcacaaaggttgccaaacctttccggctcgaaa

SEQ ID NO: 1143 - DNA, 295 bp, Nicotiana tabacum
tcgagatgctgctagggaggctgctctccgtgaaatcaaggaaaggatcaagaagacaaaggatgagaagaaggccaagaaggcagaggtgcaggccaagtcacagaaagctggagggaagggcaacatgcccaagggagctggagggaaaggtcctaagctcggtggtggcggtggaaaacgttaagctatattctgttgtttccttgtaagtcagtgtttgagagatttttttgaaggcactgtaagcggcatcatttaccagtagtatagtcaaaaccgcaggcagcaatta

SEQ ID NO: 1144 - DNA, 411 bp, Nicotiana tabacum
tccagaagcagctgtggtcaagtttatgtatggcagagaggagattttgctattctactttaagtagtttgatctttgcagttgaatggattataaggccattatccagctttcgatttgcttaagaatatcatgatccgttgaagatctttagctttaaacaattatgaaagaaaagtctaggggtgtcgatgttacaaagacaagcttgacgggacggtagatgaaaaaaaacatggcaaggaatatcctccttttttggtcattcttttgtttccaaatatgccataacttctgaaaactataactaagaaaaggggactagaaaaagattcgagatcgaatttggttattgatactctcattttgttgcctctgttttacttcttgtacacaattttttttaagaag

SEQ ID NO: 1145 - DNA, 245 bp, Nicotiana tabacum
agccactctattgctaataaggaaacaaaatgaacagcagcttaacgttttcctccgccaccgccaagcttaggaacttttgatgcacctcctttggggaggttgccctttcctccagctttctgggacttggccgtcacctctgctttcttagccttcttttcatcctttgtcttcttaatcctttccttaatttcacgatagagcagcctccctggcagcatctcgaactcgtggccgttcaa

SEQ ID NO: 1146 - DNA, 469 bp, Nicotiana tabacum
tacttgtgaaacataatgtaacggaataaatagttacaaagtgttgaagtcatttcgatgggagaactccatcaggtccagatgaaagagaattaagtacagcaaaagaccaaacaaattggatactaggaagtctggctaaagctaaccaagttgatattacaattaaaacagcaaaacttgatagctacagcttttaacttacttaataaaatagattatgcttcactggtttatggcaataggctgccttcagacatcttagctaggtctccttaccggctatcagaggactagtaccaacactggaagttgcagagaaaccaactccgatagactctggggtggagcactcacccgatttcttgctgaggccatatggtgcagcgttcatcaccctttccttccgcttctcaagaaaccgagccagagatgcttttctagcctgtggaaccgctccggctcaaaa

SEQ ID NO: 1147 - DNA, 424 bp, Nicotiana tabacum
tcaagtagaagtgaataggtaagaagtagaaagactcatatcaatccatctccataggagacaatatgagcaaaagacagaaatccctaaatcccgcaaaaaagaactcactccggagggattgagggggtattcaaaaaggggagctttaaagggtgtgccaaaggccaaaatgtcacttattatggactagagggagtactgtactaggtttggactacaaaactgaaaacgctactccctccggtcgataataagtgactttttggcctctttattttgatccaaaataagtgtcctttacatgacaagtgagacttgctcagttggtaaaagtacctctacctacgaccgttaggtcctgggtccgagtcacgctggaggggaagtgtggaaacactatagatcctcctaatttgggaga

SEQ ID NO: 1148 - DNA, 319 bp, Nicotiana tabacum
catactcaatatatagtacaaatcacacgtgagaacttatatatgtgtcaagccttattgcacagatatcctaagtagtggccttgtagctagcttattaataatggacaaaagctaagttccagtacattttacagatccattgctgcggaaaagctcgcacacctttttttgctgagcaacagttgacacatggtttagtaatcttttgtcgagtagatgggcaaaccatgtaagctacatctggatcgcaattccgtgtacaagccttgccatctgcacatttcactttatttcccagtagaaccgctccggctca

SEQ ID NO: 1149 - DNA, 431 bp, Nicotiana tabacum
tcgagatgccgccagggaggctgctcttcgtgaaattaaggaaaggattaagaagacaaaggatgaaaagaaggctaagaaagcagaggtgacggccaagtcccagaaagctggaggaaagggcaacctccccaaaggaggtgcatcaaaagttcctaagcttggcggtggcggaggaaaacgttaagctgctgttcattttgtttccttattagcaatagagtggcttgtttgaagacactgtaaacgaccaatcatttacaaaagttacatctgcagacaaaagtttctcgtatacaatttcgcacttagttaaaaatgcagctattgattccccgcagactactgatcaattgtgggtgcatcctctgttacggcgtctttttttccactcaaaccaatatgttttagaaatctgtatttgcttcaaa

SEQ ID NO: 1150 - DNA, 247 bp, Nicotiana tabacum
  misc_feature (20)..(20): n = a, t, c, or g
gggccgacgtacgcatgctncccggccgccatggcggccgcgggaatcgatttgaacggccacgagatcgagatgctgccagggaggctgctcttcgtgaaataaggaaaggattaagaagacaaaggatgaaaagaaggctaagaaagcagaggtgatggccaagtcccagaaagctggaggaaagggcaacctccccaaaggaggtgcatcaaaaggtcctaagcttggtggcggcggaggaaaa

SEQ ID NO: 1151 - DNA, 248 bp, Nicotiana tabacum
tcaagcacttcagtattcagtagatatttgaggaggagcagtagaacttgggtaccggaagagagtaatggagtaaccagatggtaattattttggaaaaaaatgaaaaatatatcaattttcaattattatttactgagcaaaagcactaagaaaacagaaaaatcgtcatagagcagtcgattagaggtcgaacacaacttatcgagaaatatggcataatttctcgaggattatctatcgagtta

SEQ ID NO: 1152 - DNA, 168 bp, Nicotiana tabacum
ttgaccagctagaacttgatgatttggtggttcatttacttcttagtctttgctcatcattatgtctttctctaaagcattttatttatattgccattatggttatcatgtttgtagatggatgaagatgagaagtacaataggaagttaggagctggactttacact

SEQ ID NO: 1153 - DNA, 245 bp, Nicotiana tabacum
agtgccttggcaagagcaacgaagcagcggaagtttcactgtgaccagcattactttttactgatccaattttcagaggagtgtctcgattcttgcaaaagaaatctgcttccacatttaattccacttcgtcaactttaggcattccgcatccgtaagtttctagaaatgagacatcagcgggcgaaactccacagtctgagtaaaatttagacaaaaactcttggaaccgttccggctcaaaa

SEQ ID NO: 1154 - DNA, 304 bp, Nicotiana tabacum
tgaacggccacgagttcgagatgctgctagggaggctgctcttcgtgaaatcaaggaaagaatcaagaagacaaaggatgaaaagaaggctaagaaagcagaggtgatggcaaagtcacagaaaggtggagggaaaggtaatgtgtcaaagggagctgcaggaaaaggccccaagcttggtggcggcggtggaaaacgttaagctattgtttatgtttgtgtttctaagtagtactagaatggttttgcatcttgattgaatgtaagtttttgatccaactgcagatcagcagttcaaacaaaa

SEQ ID NO: 1155 - DNA, 211 bp, Nicotiana tabacum
ttaagatattctggccctgatggaagccattactgggccagtcatgaaactcatgttgcaggaagtgatgctgatgatgtttgatcacctcaccatcagataaatagttctatcccaaatgtacattctttaactcaccaccccattgtattggattcttgaattgcttgctcactcagcagcttgttctagactgacctctattatgtaa

SEQ ID NO: 1156 - DNA, 259 bp, Nicotiana tabacum
tcaatcggctatcttggggtaaatgtcaatcgaactcggaggagttctcgcatggaatcattgctggtgggcttgttgatggcaacattgggctttggaatccgaagcctctgatctcaaaaggttctgaggcaattgaaagtgctcttgttggaaatctgtcgaggcacagagggcctgttcgcggattggaatttaatgggtttactccaaatctccttgcatctggagctgatgaaggtgaaatcaatcactagtt

SEQ ID NO: 1157 - DNA, 408 bp, Nicotiana tabacum
  misc_feature (318)..(318): n = a, t, c, or g
ggaatataatgtatgttgtgcttatgttgtatggaactaaaaaccttgacaaccatacaaaaaatctcacctatatagcccttcttctttaattcttccaagaactccattaaattaagctattcttgctccctgtgatttgtgggaatcaagtagaggtcatctttgcttgctgcaaaaactctacttgtttcagtagtgcgaaaatcatttgcattaaccttgtcagggagtttccaggtcaaagcaatagagcaactgggctaaaaggatgccctgtgttaactaaaccaaaacgaccattccctggaacaccanttcttccttccctgaaacccgaaaaaggaatgaaaacctggatagttgaatttttcccctgttaaagaattcaaaacaaaaaagttattt

SEQ ID NO: 1158 - DNA, 417 bp, Nicotiana tabacum
catatgggaaagctcccaacgacgttaggatgcatagcttgagtattctatagtgtcacctaaatagcttaggcgtaatcatggtcatagctgtttacctagtgtgaaattgttatcacgctcacaattgccacacaacatacgagccggaagcataaagtgtaaagcctggggtgcctaatgagtgagctaactcacattaattgcgttgcgactcactgcccgcttttcccagtcgggaaaacctgtcgtgccagcctgcattaatgaatcggccaacgcgcggggagaggcggtttgcgtattgggcgctccttccggcttcctcgcctcactgactcgctgcgctcggtcgttcggctgcggcgagcggtatcagctcactcaaaggcggtaatacggttatccacagaatca

SEQ ID NO: 1159 - DNA, 451 bp, Nicotiana tabacum
ctgcaggtcgaccatatgtggaatagctcccaacgcgttggatgcatagcttgagtattctatagtgtcacctaaatagcttggcgtaatcatggtcatagctgtttcctgtgtgaaattgtatccgctcacaattccacacaacatacgagccggaagcataaagtgtaaagcctggggtgcctaatgagtgagctaactcacattaaattgcgttgcgctcactgcccgctttcccagtcgggaaacctgtcgtgccagctgcattaatgaatcggccaacgcgcggggagaggcggtttgcgtattgggcgctcttccgcttcctcgcctcactgactcgctgcgctcggtcgttcggctgcggcgagcggtatcagctcactcaaaggcggtaatacggttatccacagtaatcaggggataacgcaggaaagacatgtgagcaaaa

SEQ ID NO: 1160 - DNA, 563 bp, Nicotiana tabacum
aacaagtgtcaacaatagtctatcacacagttcagtatgttcagtcatactcatcagacgtcggatattttaaagccgaaaattaaactaaagcataagataaaagaggttaaaaactaagacaaaagttacacaagcagatcagtctttccacaaaatgctctctcaggcagaagattcaaggttggttcgtcttcaagagacacaccatatttctttcagtagtagccgaacttatatctcctctggtatcatcacaggaaaatcatcttaatgcttagtgacaatgctccttgcaaaaggactactgaaagaaaaacagccaaagttatcctagaaaaaatgcagcagtccagcagattaatcagaggtcagacgacgcctcttttcataatctacatcacgtgatcttgaccgtgaatcatcttcatgcggtaaccgtgatttggtgtgtctccttgatgatcttcccctgtcccattcatcatcatattcttgctcgcggtcctgctacctatgatgatcaccatatctatctctatcatccctatgacggtcatgct

SEQ ID NO: 1161 - DNA, 537 bp, Nicotiana tabacum
tgcgcaaggcaaagaaaacaccagaaaagtggatgttattttgatttttgtagaattttaacaagtgacaggaagtttcatcacagtatcagccttaaccaggcaaagttagtccaagttgaataaacaaaacaccttcaagttttagtgactatcctcttcttcacagaattttgtgtactctttggaccccatcaaagactctagctcggatggactgctcggcttcactttaatcatccacccgtcttcatatggactcgagttaaccaaaccaggtgtttcagtgagctttgtgttgacctcaacaatctcgcccgagattggacagttaatgtcactggtagctttcacactttcaacagcaccaaaactgcttccttgtgaaacagcagcaccagtttctggtagatccacaaacactacttctccaagatgatcctgagcatgatcagtgattccaactgttgccactgaaccctcatgcttcacccattcatgtgaagatgcatacttcagaccatcaagaacagtaga

SEQ ID NO: 1162 - DNA, 197 bp, Nicotiana tabacum
gcaaagtcaagaagtaccaattagaaaaaaaataataaaaccagcatcacaaatttccaagatgtcttgcgcaccaaactcagcaatatcaaatgtttccgcccccttcttcgtgatgacacccttttcagtgataattccactaatcaaatttgctggagtgacatcaaatgcagggttccaaaccgaaataccat

SEQ ID NO: 1163 - DNA, 213 bp, Nicotiana tabacum
aggccgtatggaatactctagctctgcccttgaaatacatacacatcttctccattggaagaaacacaaataatgctaaccattaaacattaaaatacagtaattcattgagtttctacttctgcctcttatatatctttgccaaaaatgacttcagaactgcttgcacttgctttgcttggttgagcttcaatagagttggtcagttttcca

SEQ ID NO: 1164 - DNA, 258 bp, Nicotiana tabacum
tctccacattaatcactttttctaatcatttaacttcactactatcattaatacagtaacggagtcctatcccaaatactatcgtatcataaggataatactacaaaacttcatctctcttcaaattgaaaagctaaatatttcatttgcttgataaatccctatccatttcatcccagctgattctcgattttgttgcatttcctccgtcaaatttcaaaatatttgtatccgtcatcagagttggtcagttttcca

SEQ ID NO: 1165 - DNA, 459 bp, Nicotiana tabacum
gctagaagaaattacaatcacatacaatcaatgacaaagtagcaaaacaaaatactcacaagatactacctactatgtgaaaagctggctatgctagttttctttaataggtagttttattgccacaaccaaatcatgataattcacaaataagaagtgtttttatttgggagctgcagtttgaaagcgaggttgaaaatgggcaagtaaagcatcccttgaaggtaaatattccttaacttggctgcagttaatatactcatctttccatgcacaaaaattgggaaatttttcatttgtcaccaaaattactccagaggcttcttcaagaattcccagccaaaatcccattaaatttgcagctatatcagcatacccaaagttatctcccacaaagaattttttgtccttgagctcattatcaagaatctttagcagctcaccacattcctctttagc

SEQ ID NO: 1166 - DNA, 447 bp, Nicotiana tabacum
gaaaagctggctatgctagttttctttaataggtagttttattgccacaaccaaatcatgataattcacaaataagaagtgtttttatttgggagctgcagtttgaaagcgaggttgaaaatgggcaagtaaagcatcccttgaaggtaaatattccttaacttggctgcagttaatatactcatctttccatgcacaaaaattgggaaatttttcatttgtcaccaaaattactccagaggcttcttcaagaattcccagccaaaatcccattaaatttgcagctatatcagcatacccaaagttatctcccacaaagaattttttgtccttgagctcattatcaagaatctttagcagctcaccacattcctctttagctttgtctgactcctctccttttccaaataaagctttcccaattgtagttatgcacttaacatcaag

SEQ ID NO: 1167 - DNA, 615 bp, Nicotiana tabacum
ggaccgatagtatgacgttagaggtatatttggacggatagtataacggagggtaatattagacctttttcaatagtataaggacatatttgacccttttccgtttcaagaatccttggttcagcagatcaagaaagcaatacaagtggaagtaccacatatcaacttacaaacataatttatgccataaaccagacacaaacattactatctggatgcagaacaactctatttctttatggtttcttattttcctattcccttttccagaacaagctttctactaaaactctgcaattgccttaaaacagaatgagcacattaacaatattcaatgaacttcctcctccttgtttgtatgaataacacagtcagatctcgggtacgaaatgcaagtcaacaaataacccttctccatttgatcgtcgtcgaggaatgcaccttcggattggtctactggtcccgaaaccaactgtcctgcacaagtacaacaagaaccagccctgcacgagtacggcagctccaaaccagcatcctctgctgcatcaaggatgtattgatcgtcggacacttcaatttcgttctcggtaccatcagggcctattagtttcatct

SEQ ID NO: 1168 - DNA, 407 bp, Nicotiana tabacum
aaagagttctcaatatagggataatacaaggtattctaagcattcttgtagacatacacgtccctcatatataaagtataaacccgagcatttctaggattgtgtttcgacgagtcaccccttgcagcttattaatcaagtacactaatttgagatcaaaaagaagaaagagcaattagtccactaaactctcttcagcgttcaaataaaaaactggaaagtacataaagttgcagcaaagcggagtgcttagtaggtgtagcccttaacaaacattcctttcttagcttcctcactttcacctgctgcagagtattttccaagctgagccaaggagtttgcttttgcacgaatcaagagtgccttttgtgcagcatctacattctcaggacgaccttgccatgtct

SEQ ID NO: 1169 - DNA, 508 bp, Nicotiana tabacum
tatatgacccaagagaggccaatgtttctatagccttgacaaatgtcaagtataacttccattacaacttacagcaccattgaggaggctcatatacatacattttagtaaatcattgtaaaagtcttggacttgagttagacaacatccatgatgttattgtctccacaagcagatccaagtcctttgaattccccgagctaagaagtatagagtctacattaccaagtgtattgccgacttcctttgcaacactttcccatggtgttcctgcagtcaaatttgccaatagctccccgctcctgttaacagcatctgtcattcctgggggaacatctggcagagcctgctgtagaggaagcgcatggtctccaggaagagagcggatggacatatccagcattgagctgatagcagaacctgagctgagcacttgagctagtgttgaagtttcgtcgattgtatcatctttgaactttattaagagattcctcgatatcccgtagta

SEQ ID NO: 1170 - DNA, 479 bp, Nicotiana tabacum
caagcaaagaaaaagataaggacgctctcaaggtccggaagaagagccgctctcacaccaaacgtcgtcgtagccgtcactcatcctccgatagctattcttcttcctcttcctctgaagactacagttcttcggacagtgagcgtgaagcagtcaacagttcaaaaagacacagacagaaagatagagccactaagaaggataaagagagagggaaaagtcacaggcaaaaacgtcataagcataaaagtaaagaggtagatttttgttctcatgaccatgcagtagacttctgctttttatgttttaatgttttacactactgctccgagcatataaaactttaagcatgctgttgtacagtccatataaactttttatatgtcagttgttgggagttactgtgtttattaatgtatgagatgctgatagtacaatcactagtgaattcgcggccgcctgcaggtcgaccatatggg

SEQ ID NO: 1171 - DNA, 180 bp, Nicotiana tabacum
gtcttggtcttgtgctgctagctcatttcaggcgtctttttccccttttcttcaagtggatgcatgcggatgatgacagaactgttctactggttctagaacggatcaaaacagttgtaaagttgacatggataaggaattcgccacacattgaaagattggtggatgagcttgttagtt

SEQ ID NO: 1172 - DNA, 200 bp, Nicotiana tabacum
tcttcggacataggatatgataaagtctaacacttaactaaagcataagataaaagaggttaaaaactatgactcatgttactcaagacagatcaatctttccacaaaatgctctctcagacgaaagatacaaggttggttcgtcttcaagagacgcgccttatttctttcagaagtagccgaacttatatctcctctgg

SEQ ID NO: 1173 - DNA, 455 bp, Nicotiana tabacum
agaacaccgagtgctgaacctcagagtgcccgacaaaatctgggcacaaagaatatgaaaagataatacagatgattaaaagacactagaaggtagcagatcagcaaaaaactgaggattaaatcctaaaacattacatcaaaattacaagttcagttcagtatgttcaagtgatactcatcggacataggatattgtaaaagtctaacacttaactaaagcataagataaaagaggttaaaaactatgacacatgttacacaagcagatcaatctttccacaaaatgctctctcagacgaaagattcaaggttggttcgtcttcaagagacgcgccttatttctttcagaagtagccgaacttatatctcctctggtatcatcacaggagaaatcgtcttaatgattagtgacaatgctccttgcaaaaggaatactgagagaaaaacagccaa

SEQ ID NO: 1174 - DNA, 167 bp, Nicotiana tabacum
tataaggggtttgttgaagtactggcctgtcactaattgccagaaggaagttctctttcttggggaactcgaagaagtgctggaagctacgcaagctgctgaatttcagcgctgcatggttcctctttttcgacagattgctcgttgccttaacagcccgcactttc

SEQ ID NO: 1175 - DNA, 129 bp, Nicotiana tabacum
tgatttctcagccatgactggactgcttaatgatccaagtattaaagaactagctgagcagattgcaaaagatccttcatttaatcagatggctgagcagcttcagaagacctttcaggttgcagcgta

SEQ ID NO: 1176 - DNA, 394 bp, Nicotiana tabacum
gaaataaggactggaataggaataatattgcatgtcaattttgctcactgtagtactcaaccatacaaaggcaaaaattacacctttagaaacactattggagcggaatcggagaaaaagaaaatcagaagggatacccaaagcacttaatttccacaaagccggatgttctagcaggaaattacaatttgcagtataaatattgagaggaataaatggaagacagacctctcaatatctctataaagctggattccagtacttgtttccggttgattgttgtctttcaggttgcagcgtaaagggcgaattctgcagatatccatcacactggcggccgctcgagcatgcatctagagggcccaattcgccctatagtgagtcgtattacaat

SEQ ID NO: 1177 - DNA, 574 bp, Nicotiana tabacum
gcctgcttgccgaatatcatggtggaaaatggccgcttttctggattcatcgactgtggccggctgggtgtggcggaccgctatcaggacatagcgttggctacccgtgatattgctgaagagcttggcggcgaatgggctgaccgcttcctcgtgctttacggtatcgccgctcccgattcgcagcgcatcgccttctatcgccttcttgacgagttcttctgaattgaaaaaggaagagtatgagtattcaacatttccgtgtcgcccttattcccttttttgcggcattttgccttcctgtttttgctcacccagaaacgctggtgaaagtaaaagatgctgaagatcagttgggtgcacgagtgggttacatcgaactggatctcaacagcggtaagatccttgagagttttcgccccgaagaacgttttccaatgatgagcacttttaaagttctgctatgtggcgcggtattatcccgtatagacgccgggcaagagcaactcggtcgccgcatacactattctcagaatgacttggttgagtactcaccagtcacagaaaagcatct

SEQ ID NO: 1178 - DNA, 223 bp, Nicotiana tabacum
gtgggccgcagcgctgtcacgccacagcgagaagctggataggtaatagagccggtagtttctgaaccgattgcaaatggaaccaaacctgctgaggtgcaagaagcaggccctgctgatgaacccgtagaatattcctttatattccacgggtttcttgttctaccaccaaaccagacatcatcatatgctaaagaaccagttaccaactttgcaacaagaa

SEQ ID NO: 1179 - DNA, 250 bp, Nicotiana tabacum
tgaaacgacctacgtccatttcacgttaatatgtatggattgttctgcttgatatcaagaacttaaataattgctctaaaaggcaacttaaagtcaagtatatagtaatagtactatatttgtaatcctctgaagtggatctataaaaagaccaagtggtcataattaaggggaaaaatatgagttgataatcagcttgatgtatgatctgatattattatgaacacttttgtactcatacgaatcaaaa

SEQ ID NO: 1180 - DNA, 455 bp, Nicotiana tabacum
aacctgaaagtgaccataccattttgaaacatttttcagggtaatcattatgctgtccttcttttcaagtagctgaccaacaacgacgcgctaagactaataacgaaataaacaaatccggcaaacaggatcatctcaacctgcgtaccatcacgctcaccaatggttgaggcggtacggaagaaatcggccagggataacacatacaccagtgaggtatcctggaacagtacgatgccctgagtgagcagcagcggcaccatcgcgcggaacgcctgcggcagaataatcagtttcatcgactgccagtgagtcattcccaacgccagcgcggcgctcgattgaccacgagaaatactttgaataccagcacggataatctctgaatagtaggccgcttcaaacatcgaaaacgccaccatcgccgaaattaaacggatatcattttttggcga

SEQ ID NO: 1181 - DNA, 189 bp, Nicotiana tabacum
ttcatctggaatctgagaggaatcctgaacacctcatggcatcgggttcaagtccgagttggccaagcaaatctttaggctgtgttcatgtgttgggcggatggcttattcagcatcaaatgcaatggttgtgtttgtatcttcctagcttaaaatgaaaatagcatgttttcttgatgtcgtctcaaa

SEQ ID NO: 1182 - DNA, 311 bp, Nicotiana tabacum
aggcagatgatgttcctcttcattggcgaatgaagcaacatgagaaggtactcgaagacggggtgcttgatccagagacaactgtggtttctatattcccatctcccatgcactatgctggtccaaccgaggtgcaatggcacgcaaaggctcggatcaatgcaggtgctaacttttatattgtcggacgagatccagcaggtatgggtcatccactggagaagagagatttgtatgacgccgatcatggcaagaaggtactcagtatggccccgggactagaacggctaaatatcttgcctttcaggttg

SEQ ID NO: 1183 - DNA, 266 bp, Nicotiana tabacum
gcaacctgaaagcaatgcgaatggagtttatccaatctcttcctcccagatgatcggtccatcacttcgcgaaacgcacctttaaccctgcttaaaaacgctaacccatcagatttatcgatcttttcatcgaaaatggcgaaaaacacaaatgcgttttcgattaagaacgtgtacgtcctgttacggacggtgtgggtgaaaaaagtgtgtaaaggtggagtcttttcaaggcattttaaggcaatcgaaccaagatcggcatc

SEQ ID NO: 1184 - DNA, 340 bp, Nicotiana tabacum
tgcaggaattcggcacgaggagaacctacgcttgcacccatttcaggtgccaaaggcaaaaagaaagacggagatgaaaggagtaaggatatgatgaagaagcatcgccgccaagttttatttagtggaatcatcacagcagtaggcataagcttgcataactttcctgaagggatggccgtgttccttggatcaatgaagggacttcgggttggtctaaacttggctcttgctattgctttacacaacataccagagggtgttgctgttgcacttccagtttattttgcgacacaaagtaaatggcaggcattcaaattggcaacactttcaggttgca

SEQ ID NO: 1185 - DNA, 390 bp, Nicotiana tabacum
cctcgtgccgaattcggcacgagggggaagtttatggtgcataggccgtttataaggaaggcgattaataatatattttataggtttatatatgagacggagaggcacagtgggataggtgagcttttggagattttagggagtattataaatggtttcgcgttgccaatgaaagaggaacataagcttttccttgttcgagctctcataccgcttcacaagccgaaaccgattgcgatgtatcatcagcagttgtcgtattgtattgttcagtttgtggagaaggattacaagttggctgatacagttataaggggtttgttgaagtactggcctgtcactaattgccaaaaggaagttctctttcttggggaactcgaagaagtgctg

SEQ ID NO: 1186 - DNA, 474 bp, Nicotiana tabacum
gcacaggttcaaacgtatgaattgcaaggatctaaagtcctgcacatgattttactcactccgaaatcggcgatttttacttccatctcgcgatttactagaaggttcgaaggttttaaatctctgtgaatgattttgtgattgtgtaagtagtcgagtccgctaagtacttgcttagcgatttttgctaagctaagttcggagaaagttgcttgtgattttaaaagactttctagtgtgccgacgttcatgtactccataaggataccgatgtcgccgccgggcatgtcgatgacaccgtggcacttgatgacgtaaggagaatccgtccggcgaaggatggagatttcacggaggatttgacggcgaatctcggggtcgctatcgccgtgaacgactttgagagcgtagattgcggatgtgcgtttgtggcggactttgtacacagttccgccgtttccgtgaccgagaacc

SEQ ID NO: 1187 - DNA, 331 bp, Nicotiana tabacum
gcctctgcaccaaaaacagcttccagtagcagcaatggcaagaatcaaggttcatgagctgaggaacaagacaaagactgagctactggctcagttgaaggatctgaaggccgagcttgccctacttcgtgttgctaaggtcaccggtggtgctcctaacaagctctccaaaatcaaggtggtaaggttgtcgatcgcacaggttctgactgtaatttcgcagaagcaaaaaactgctcttcgggaagcttacaagaacaagaagtacctacctcttgacctgcgccctaagaaaactagggccatccgcaaacgtttgaacctgtgctct

SEQ ID NO: 1188 - DNA, 173 bp, Nicotiana tabacum
gattatttaatagttttgtccaactttctcttagggaagtccagagagaagttattattaatatcctgttgatgtttttctctattttatattatactttccttttgggggtggggacacaatcaggtggtgtaattataatattgcttattatatattgtttctgtgtaaaa

SEQ ID NO: 1189 - DNA, 316 bp, Nicotiana tabacum
cgagaggagttgttgagcaataagcacactccttggagcctagtcgtttgattcatcagtttctgcgagcgatatagcatgagattaaatggcaaataccattgatttgattaagtgtacagtaagaaacacggcgttagtcgccttataaattagtacattaaggtaaatctgtattctatagtatctattatttagaggagcttgctcttggaacatggcgataatcgccttatcaattagtatacattcatctaaatctgtattctgttatctgtagtatatattatttggagcttgctctttacagggaaaa

SEQ ID NO: 1190 - DNA, 471 bp, Nicotiana tabacum
gagcacaggttcaaacgtacaggacaaaatgatgaagttagtgaatgcttttttcaatctcctgggaacaatactgataatttgtggttcaatacacttattcaaccatttctttgtggatatccgacaaatcactgcgtttggcgacttctatgagcacttggcgccatcgctcattcttctgcttgactgagtgttcgcgctgttctcggatcttcttcagagctgattcatccagagcggggtaaaatggctttgagtcagattttttcttatcctttttcaggtttttgttttttttagtcactgatttaactcctgacaaagctttttttccaattttgacatcggcattctgcacagagacaatcatcttcctgtaaatctgtgaaaccatttctgttaatagcgatgatgcgagacgcaatcagaagtttttcagctaaaaataaggtgaacttaaagataaaa

SEQ ID NO: 1191 - DNA, 523 bp, Nicotiana tabacum
taccttaaactacacaaacaagccatgggcaaattagaaactgtcaccaccacctctgctgccgccgccgatgactcgccggagctgaccaccaatttcaagctagtggggttcaagaatttcattcgaatcaatccccgttccgattttctctccgttaaacgcttccatcacatagaattttggtgcggcgatgctaccaatacggttcgccgtttctcttggtctctggggatgccaattgcagctaaatccgacctctccaccggaaactccgttcacgcttcgtacctccttcgtcccgtttcaggttcgcttcagtttctcttcactgctccttattcgccgtctatttcgacgccgtcatctgcagccatccccagtttctctacttccgtacaccgctcttttacggcaactcacgggctcggcgtccgtgccgttgctttggaagtggagaatgcttacacggcgttctccgcgagtgtttcacgtggggcgaaacccacgtttgaaccgtgct

SEQ ID NO: 1192 - DNA, 217 bp, Nicotiana tabacum
gaaatgcttgttataaaaatgtgtcacaagcttgaggagattccccctagctttgcagatattgaaacattgaagcagattaagttgattgggcgcaggccacaaactctggagccttcagctgtgaaacttaaggaagacatcgaagagattgaaggatgcaaccgtcttaacctcattatggacgtttgaacctgtgctctaaatcatcgaattc

SEQ ID NO: 1193 - DNA, 520 bp, Nicotiana tabacum
gtgccgctgatgtaacatataatgatgttggtggatgcaaggaacaaattgaaaagatgagagaggttgttgagttgcccatgcttcaccctgaaaagtttgtgaagcttggaattgatcccccaaagggtgttctctgctatggtcctcctggtactgggaaaacactgcttgctagagcagtggcaaatcgaacagatgcttgctttattcgtgttattggtagtgagcttgttcagaaatatgttggagagggagctcgtatggttcgtgaactattccagatggcacgctctaagaaggcatgcattgtctttttcgatgaagtagacgctattggaggtgcaagatttgatgatggtgtaggcggagacaatgaggttcagcgcaccatgcttgaaattgtgaaccaactagatggatttgatgctcgtgggaatattaaagttctcatggcaaccaataggcctgatactcttgatccagcattgctacgtcctggacgtttgaacctgtgctc

SEQ ID NO: 1194 - DNA, 410 bp, Nicotiana tabacum
tagagcacaggttcaaacgttaattacattccaataaaacatacaagcaactgctaagtggtaaggaagatagatctatatcagaaagcagtaggaaatacattggagaaaggctaataaggaaggatcattatttagggatcgaggattagatctaatcgctatcgctgtcgctgctgctgctgtcatgcccatcgtgcttcttctcctttttgtcctttttgtcctttttcttcttcttctcctctccttccttgtgatggtgctctccgccttcttctccatggatcttttcctttatcttctcaacaatcccttccttgtgctctccgctgctatggccgtgatcctttttgtgcttctcttcttccttgtgcttatcagcctcatggtgtttgtctttctctcct

SEQ ID NO: 1195 - DNA, 307 bp, Nicotiana tabacum
ttgttgagcaataagcacactccttggagcctagtcgtttgattcatcagtttctgcgagcgatatagcatgagattaaatggcaaataccattgatttgattaagtgtacagtaagaaacacggcgttagtcgccttataaattagtacattaaggtaaatctgtattctatagtatctattatttagaggagcttgctcttggaacatggcgataatcgccttatcaattagtatacattcatctaaatctgtattctgttatctgtagtatatattatttggagcttgctctttacagggaaaa

SEQ ID NO: 1196 - DNA, 490 bp, Nicotiana tabacum
agatcactgctcttcttcttttttgaactctttgtgcttgtcgatgttgaaggttctggtcccatagcttgtggcatggaaccctgtttgtggatttccatgtgcaactctggagccttagaggtaacttccaaagacttgcggtaaatgtcatttcctggatccgcatcaactgcctgctgaaagcactgagttgctttgtcaaagtaaatcttagcctcatccatatcaggagttaaaaacgcatgagatgtatgtgcattccccaaacaccaaagagtttcatgcttttcgggattaacctccaatgcctcctccaactttgaggttgcctcagaaatcatctgttttgattcaggaacgggctggaactgtgataattccaataacgcgcctccccatctcgttaagttatcagcatcgagtggattctgagcgtaggtggtttcggcagtcttacgagcgtgctcgaagaagagaaggcgatcga

SEQ ID NO: 1197 - DNA, 316 bp, Nicotiana tabacum
cgcatcaaagcgcttagtagacgaaaaactagaagtggtggacttcacgagccaagtcaacgtctcagctgatccggggcactatgtgatcttctgggaactgagtggtgaagcaactgatgaaatgttgcaagattgctgcaactgtttggacagctcgttcatcgatgcaggctacgtgagctcccggaaagtgaatgcaattggagcacttgagctgaggatagtgaagaggggaacatttcataagatattagaccattttgttggattaggaggtgcagttagccagtttaatactcctagatagatgggt

SEQ ID NO: 1198 - DNA, 311 bp, Nicotiana tabacum
gggatttggagtatggtctttgtgggatgcattccatgatcgggaatctgaggaactggctgaagttgaagcagagctggacgcggatataacagctaatggtggagcaatcaaggagaagaataaggattctgacgagttaaagaagcagaggcggcctcttctcactcaattcttttcacccatctttctgaaggcattttcaattaccttctttggtgaatggggtgacaagagccagcttgctaccattggtttggctgcggatgagaatccactaggagttgttcttggcattactttgggacgtt

SEQ ID NO: 1199 - DNA, 573 bp, Nicotiana tabacum
attcgctaaagtgtgccattgatcacattcttgaggctgaacagaagggagagatcaatgaggataatgtcctttacattgttgagaacatcaatgttgctgcaatagaaactacactgtggtcaatcgagtggggtattgctgaactagtgaaccaccctgaaatccagaagaaactccgtgacgagattgacagtgttcttggagtaggagtgcaaatcactgagccagaactcaacaagcttccttaccttcaggctgtaatcaaggagacccttcgtctccgtatggcaatccctcttttagtcccacacatgaaccttcacgatgcgaagcttgctggatatgacattcccgcggagagcaagatcctggtaaacgcttggtggctggctaacaaccctgctacctggaagaagcccgaagagtttaggccagagaggttctttgaagaggagaagcacgttgaggctaatggcaatgacttcagatatcttccatttggtgttggtaggaggagctgccctggaattatccttgcactgccaattcttggcattactttgggacgtt

SEQ ID NO: 1200 - DNA, 286 bp, Nicotiana tabacum
caactctcggttctcttgacctgttgtttgcctctgcttcttgcagactttgcaggataaccagaattagcaaatatgaagtgtgcaggaaggatgggaatccactatatgcagaaattgaacgcggcgaatgttccaaaagaattagtagaaaaaggacagaatcgtgttatagaagcatctcttacacttattcgtgaaagagcaaagcttaagggagagcttattcgtgctctcggaggtgctgtggcctcaacgtctcttcttggcattactttgggacgtt

SEQ ID NO: 1201 - DNA, 430 bp, Nicotiana tabacum
acccaaggagactcgtcttgtcagggtgccttggagctttaattgtaatgaccattctgtctgctgttgttggttgggctgctcccaatttggtctcccgcaaatggacccatcatattacaacattgttgttcttgggatttggagtatggtctttgtgggatgcattccatgatggggaatctgagggactggctgaagttgaagcagagctggatgcggatataaaagctaatggtggagcaaccaaggagaagaagaaggattctgacgagttaaagaagcagaggcggcctcttctcactcaattcttctcacccatctttctgaaggctttttcaattaccttctttggtgaatggggtgacaagagccagcttgctaccattggtttggctgcggatgagaatccactaggagttgttcttgg

SEQ ID NO: 1202 - DNA, 169 bp, Nicotiana tabacum
aaacgtcccaaagtaatgccaagaaccttctgatttgataacaacaaacgaaaaatgaacagtctctcccatttcaaccttatgggaaaaacattcttctctgtctatcacaaatctaatccctaaagcccctctggaactccatgccaccaccaatagcgcaatcaag

SEQ ID NO: 1203 - DNA, 253 bp, Nicotiana tabacum
tgctcctcactgattttgtctgttgccgctctactcaggaactagacgatatgatcgatagctccttcctcgtcgatttgatgattattcattgagttgttttaccgcccggtatttatgtagataatacacattgtatatttatgcattttggtgagatttttgttttgtactagtagggattattgtacttgtttttgtataattattggtttggctatataataaaagactgttttcgttttgtattaaa

SEQ ID NO: 1204 - DNA, 320 bp, Nicotiana tabacum
gttcacttctctcttttaaattcaaaaccctagaaattaaatttcaatttcctctctctgaagcttctgaaaaatgtctggacgtggaaagggaggcaagggattgggcaaaggaggagcaaagaggcacaggaaggtgctgagagataacattcagggaattacaaagccagctattcgtaggcttgctcgtaggggtggtgtcaagcgtatttctgggttgatttatgaggagacacgtggagtgcttaagatctttttggagaatgtgattcgtgatgctgttacctacactgagcacgctaggagaaagactgtac

SEQ ID NO: 1205 - DNA, 334 bp, Nicotiana tabacum
gaagtgcagcaaattgggcaaattggggccagtagacatgttttagacctcattaaaaaaaaagactatattaacaaagacttgttatctttgttaattgctgctgttttattaattgtgtttcaagcattttcatcttctaaatggacctcagctttgtaaattgacttgaggttcctagatgggaagattgtctctttagcccttttttttctctttattttgtacatactcattttggggattaacctttgtataaatgagactctctcttagtttgctccatataagtttccatattaataaaaaaattcgcttagagttcctcacaaaa

SEQ ID NO: 1206 - DNA, 415 bp, Nicotiana tabacum
ctgatgagcagattcaggcttgcgaagaattgggaatattggtggatagggatgatcaggggaccctgctacaaatcttcaccaagcctgtgggggacaggccaacaatatttatagaaataattcagagaatcggttgcatgctcaaagacgaaaaaggacaggtgtatcagaagggcggctgtggaggcttcggaaagggaaacttttcagagctctttagatccatagaggaatatgagaagacgcttgaagccaaacaagttaatcaagttgctgctgcttgaccatataagtattaactttctttttgccctgtctaattgacattgtggacaaggcgtagacttggtattagtaccttagctgctgtttgatgtctctgttattaatgaaaaagcttatgtatataagt

SEQ ID NO: 1207 - DNA, 394 bp, Nicotiana tabacum
gccggtcttaatgtgttgcgtattatcaacgagcctacagcagctgccattgcttatggtctcgataagaaggcaaccagtgttggtgagaagaatgtgttgatctttaatcttggcgctgaagggcgaattctgcagatatccatcacactggcggccgctcgagcatgcatctagagggcccaattcgccctatagtgagtcgtattacaattcactggccgtcgttttacaacgtcgtgactgggaaaaccctggcgttacccaacttaatcgccttgcagcacatccccctttcgccagctggcgtaatagcgaagaggcccgcaccgatcgcccttcccaacagttgcgcagcctgaatggcgaatggacgcgccctgtagcggcgcat

SEQ ID NO: 1208 - DNA, 521 bp, Nicotiana tabacum
atcattgccaatgatcaaggtaacagaacgacgccatcctatgttggtttcactgattctgaacgtctcattggtgatgctgccaagaatcaagtcgctatgaaccctaccaacactgtctttgatgctaaaaggttgattggtaggaggtttagtgatgcctctgtgcaaagtgacatgaagttatggccattcaaggtcattcctggtgctggtgataaacccatgattgttgtcaactacaagggtgaggagaagcagtttgctgccgaggagatctcatctatggtgctcattaagatgaaagagattgctgaagcgttccttggcacaactgttaagaatgctgtggttactgttccagcctacttcaatgactctcagcgtcaggctaccaaggatgctggtgttatttcaggattgaatgtgatgcgtattatcaatgaacctacagcagctgccattgcttatggtcttgataagaaggcaacaagtgttggtgagaagaatgtgcttatctt

SEQ ID NO: 1209 - DNA, 340 bp, Nicotiana tabacum
agccaactggaaacttgctgatagtttttgaggagataggtggtgatgcatcaaagatttctcttgtcaaaaggtcaattacatatgtatagacatgatatcatttaggtattattatttaaaagaaaaatttggtgtgagatttatctcatagaaaagaaagggttctacgaaaagctcttatgctagtttttttggccaataattagcttatttgatttgctttcccatcatcttcattcaaaatgtggctgcagtgctactgctggtcttcctcatcgatgtacatattaagaagttattaatggaaaaagaactctatttgtttcatttcagaaaa

SEQ ID NO: 1210 - DNA, 256 bp, Nicotiana tabacum
ctaaaggaagtgttagtggatgaagaaattggtgaaggggctgtgtaatatcttagatatttccatatatgacttcctctttttcctattaaatacttgtcttttgttgttttatctttttgggtatcggtagggtatgggaaaagatgaaattagaaaagtgctgcctttaaagctcaaatgactatgtactttttaatttgatgctgcagcttaatgttaattcggataggccttagttctttcttggccaaaa

SEQ ID NO: 1211 - DNA, 384 bp, Nicotiana tabacum
aactaagtcctcacggatgacagcgggagcgggtgtcggcgacggcggaggtgcagcggcggccattttctaggggaagttgaaaagagagaaaattttgttccggtgaatttgggggttaatggttagtgtgaatgttgttgtgggatatatagggcggtaaaatacctagaaattgaagggagagagaggtaaaatagaaagaaaaaaaaagcttatggatgttcatttagtacttcgttgtaaataatcttcctgaataagcttattcatatgagattccaccgtaaatatgtttatctatttagtactctattggaaataagcttcctgaagaagcttatcacttcggtacccagttatgaataaacattaccctagggg

SEQ ID NO: 1212 - DNA, 224 bp, Nicotiana tabacum
gaggggaaggacctggttctgtcagtgatgtctgccatgggagaggagcagatttgtggtatcaaggacgttggccccaagtagctgcaggatgtggtggtgtatgttacaaagtttcaaaaaaagctgtatcaaagctatgtagaagtaccaacacttttttactttttgttgttccagataactgctattcaactatatgctatgactggattcttgtaaaa

SEQ ID NO: 1213 - DNA, 265 bp, Nicotiana tabacum
cacttttccttgataataatcctcttttgaactcaaaatcagaactttgatcctttgcacttgcgatttgcttactctctcgatttcactttctctgaaccagcaaagccctatttctaaagctatatatggctcaatccagcgataatgttgttggagttgataacacttttcggaaaaaattcgataaagaagagtatttgcagcgtgctcgtgaacgtgaagagaaggagacggagggaaagaaatccaagtcaagaggacc

SEQ ID NO: 1214 - DNA, 254 bp, Nicotiana tabacum
accattctgcggattctgaggcagggagacaactaggtgcagggagtgtcacctgatgcgcatttgtttatttaacaatttttaagaattttgctttgctttgtttaagaattacgcagatagattgtgcgtctctctgctcgtatattacttgtaagtagtgttaaagtttccaatgttttgatggtgtcaagtacaatttccggaagttcaaaataaagtatcattgatgttgcacaatttctggtcgaaaa

SEQ ID NO: 1215 - DNA, 235 bp, Nicotiana tabacum
aatattctttttgttctcaagagtttgatagatgtgaaaatgatgaagcacagcaaaagaagcctttagatagaaacaatattttcttggaattcttgaaaaacaaggatgtagcaagttttgtgagactaggaagagtcattgtataggatttaatttttgtaatttgatagtgtaattttgtttttacactattagtgtaatttaatttattatagtaagctttcatttaaaa

SEQ ID NO: 1216 - DNA, 452 bp, Nicotiana tabacum
caataatctccctctttctacaaaaaacaaaagagaataatgactggtacaaaaactaatgattttcaagatatgttaccaatgatggcaaataagctaggtggggatggtttaattagagagctatgtaatgggtttcagctattaatggatagagaaaaaagggttattacttttgagagtttgaagaaaaactcagcaattcttggtctacaaaatttgagagatgatgagctgatgagtatgttgagagaaggtgatttgaatggggatggtgttcttgatcagatggaattttgtgtgcttatgttcagattgagtcctgaattaatggaagaatctgaagatttgcttgaattagctttgcaacaggaattcaagactaatccaacaaggtgatttgatatctgatgttccatttgaaactcgaaaggaaaatcatttgaaccttc

SEQ ID NO: 1217 - DNA, 292 bp, Nicotiana tabacum
aagcagcagcagcagcagcagaagggatggtggccaatacattattgaaccaaccatttcaagaagtcattttactataagataaaagtatagaatgtcatttgaaaatgtggtaatttgcctgagtgttagctagcgctaacgccagcatcctccgccattttttccatttgcttttagtcagttatacagtaagacgtttcgtgtcaatgtggctataatgtccgtgagttagctagcgctaacgccggccaatgccacctctattaccattttttgtcgtgaaatcttt

SEQ ID NO: 1218 - DNA, 253 bp, Nicotiana tabacum
acgaggtagggttctttgaaatcgtgaaaaaagagagagagaaatggcagagcagctaacggaggagcagatcgctgagttcaaggaggcctttagccttttcgacaaggacggtgatggctgtattactaccaaggaattgggaacagtgatgagatcacttggtcagaatcccactgaagctgaactacaggatatgatcagcgaggttgatgctgatcagaatggaaccattgattttccagagttcttt

SEQ ID NO: 1219 - DNA, 94 bp, Nicotiana tabacum
gaaaaagctttacagttggcctgatgtagccaggaggacagaaattgtttacaaccgtgctttgaaatgctccaatccacctttgctagatcga

SEQ ID NO: 1220 - DNA, 456 bp, Nicotiana tabacum
aagggctttatttttgtggagcaacgatcacattgagaatttgataaagcaaaatcgaaaggtgatactgcctatcatctttcctgcactggagagaaatgccagaaaccattggaatcaggctgttcacagtttgtcactgaatattcggaagatattctatgatcttgatcctgatctattcaaggagtgcttgcacaagtttcaggaggacgaattgaaggaagatgagattaagtcaagacgtgaagctacatggaaacgattagaagatgttgctgccaaaaattctacaagtactgaagctgtgcttgtgccgtccactgggcgttctcgaacttaatattaagatatgcttgttcttccttgttcttcattttgatatttctggttagtttacatttcggaagcagtgaatttattaaagggagaagggattttttgtgtcattggctt

SEQ ID NO: 1221 - DNA, 289 bp, Nicotiana tabacum
gcccttcccggtggggtgccagaggccaccaaggggaaatggaagtggaaatgaacccgctacttcgtttccatctgttcaatcatctaaacctgcagcaaaccaagcaccagcacatttcatttgccaacttatgatggctctgttttccctttttagctattatttgatcattatttcttcatgaggctttttattgccctttgtataatattgagctctgttaaatgatcgcatagaattgaagcgactaagtacagcatgtttgatattgctgtttataccaaaa

SEQ ID NO: 1222 - DNA, 292 bp, Nicotiana tabacum
ccaaagtgtcaccaccttctcaggagatctctactggttttgcaaattttgcaggtctgatagggcccttctctaaagaagccactggttcttggtagtcttcaggctaggctctacatcttcaattgtcatgatccggatttcccaccctcgggagtcttgatggcgcctacctgtgaaaggtaggcaagccgcattatgtagaatcactaactcttttagttaaccctttttaacagtttaaattaatatacgataaacaatgaaatattaatgataagtagatacaaaa

SEQ ID NO: 1223 - DNA, 424 bp, Nicotiana tabacum
tacgactttgatttcacgactgaagaaaacgtccagaagagcagaatattcttcattgcttggtcacctgacacggcaagagtgagaagcaagatgatttatgcaagctccaaagacaggttcaagagagagcttgacggtttccaggtagagctgcaagcaactgatcctacagagatggggcttgatgttttcagaagccgagttggtggaattgaatgttgagtgcacgagtttcttgcttatgctaagtgattatagtttgtggggaagtagaacgtggttagttatactattggcttgtcgttcgcgttcatcgtactcttttaagtctcttcttctcagagaacttccaatactctttaatatgttatattgttactcatgaagtcaaggagctactttgttattttgagttttaaaa

SEQ ID NO: 1224 - DNA, 487 bp, Nicotiana tabacum
aagtgcggcaacggctgtggcggatgcaagaattacccagatttgagctacaacgaaagcaccacaactgaggctttggtgcttggggtgggacctgagaaaacaagcttcggcacaatggaaatgggtgaatcccctgctgctgagaatggctgcaaatgtggatctgactgcaagtgtaacccttgcacttgttctaagtgaacaaattaaatcttaattaagcagagatggatgggtgttagccttttatggctaagataaaaaataactatagtttttaaaatgtagtttatagttgtgtctgttgaaaacagggggaaattatgtgttttttcctctgtaataaggaagagtaatggagtctgaacaatgtttgggttcttgttattgtggcgttgtgtatacaagtagttgtgtggtttgtaacatgagcatctctgcttctggtgttttaacctatgttatttcctttttcccgatcaaa

SEQ ID NO: 1225 - DNA, 390 bp, Nicotiana tabacum
  misc_feature (270)..(270): n = a, t, c, or g
ctcatatttgccgtctcgctgataccattcatcttgtccacgccgtctccagtttgagaaatgagatcgtctatgaagctacacaggccctcatggagaagcttgccatcgaggctttcgaggttgctatggtgaagacagtggctaggattgtggaaggagatgctggaaaggtaatatgcaaggaagcagaaaggttgaagcctgcagcggtggttatgggaaccagggaacgtagtttaatcaaaagtgtacttcaaggaagtgtcngtgagcattgctttcaccattgtaaaacagccccaatcataatagttcctggaaaagaagcaggggaagaatctgtaatttaatggaacttgccaagtttgagtactgctgatgatcatt

SEQ ID NO: 1226 - DNA, 483 bp, Nicotiana tabacum
aggaaatggcaacagtagttgatgcttgtgtgtgtgagattacaaagctaagtgagaaggtgagaaacagaagctttttcttgttgaaatctcagaagaagaaaaagtcaggggataaagtggaagaaagcaaaaatagccagaattcttcttctacttcagtggcagagacaaagaatgacaacacaatgtgtgaagcaactgtgttcttgctcatggaccgtcttgctccttgttgaaaccatgatttttgatgttttaattaatacccaagtatagtgtataatctcttagatttttttatagtagtatgtataaatgttcttgtatatgtatcttatgtaagaaggttatatcatttagcctgtagtttattcatcatcccaacttcagtttctgtccatttctggttgtgtaattttttggaaaatattagcagatggatgttatatattcctccggaaaaatcattcataaataaaa

SEQ ID NO: 1227 - DNA, 457 bp, Nicotiana tabacum
caacaaggcttccctttaatcttaactttgtcaaacatctttgcatatctagtatttgtctgtttgtcttggaagaggtttcatttgctctttgcttgctaagaagtttcccatgtttacaatatgtggaaattaaggtggaggccggtgatggcaatgatatacctgccctagaatgccttgaagtagaacaattctcagatgtgtcatttaagcacctcagggaagttaagctaatacggactaatggcacaatccgtgagatgcagcttatgaagcttctgttagccaagtctccagtgctggtgagaatactaatcgagccatgtctagttgaagattctgcaactgtcaaaatacttgctgaggtaaaaaaatttcagcgtgcttcacctaaagcagaagttgtctgtaaacttcaataagcatccatattaccatccttttttatcatctc

SEQ ID NO: 1228 - DNA, 575 bp, Nicotiana tabacum
gtcactgcctatattgccacttttaaaacaaaatatccgtatatatctacagtttcctaagatcagtttccctgacgaaaaggccgtggaaaccgtaaggcactcgacgaggcaatttgacagcagtcacaatgtcaagattaggggactttgcatccatgaccaagaaccttgactctcctgtcttctcattgtgcacatacgacacaacgtagccatcgtcctcatccgctgccgaattgttgggatcctttgccacaaaaaatggctcaccgccaaagcagccttctccaaataatcggcacgccactatgcattcgcgccgatcagcttctgctactgatacgtccaattttgctatgcctgctatctttggcatagggtctccaatcgctgcatatacgtacttgttcttcttcccaacataagccggattgatgactccaaaatcaagattccttgtcgacactggatgtctgctcaccatcccactcttcaaatctatcttcactttctcaacagaagcatgtatcatatccattctctccagcgtatgctccaccgacaatatattc

SEQ ID NO: 1229 - DNA, 234 bp, Nicotiana tabacum
cattggacaaacaggggaaaagttggccatagatctgctagcacaataatcttgttacatcaagtcatccagggaaaaagctaatttagtttgtggttattccatcaatgatgaagatatgttgacttcctttcttgatgagctttctaaggtggttcatttaccgcggtaaaatattgattgaacacataattatgcgaaatggatctcttctatcttgtgtttgatttaaaa

SEQ ID NO: 1230 - DNA, 477 bp, Nicotiana tabacum
ctctttggtaaaacagttcctaaaacagcagagaacttcagagcattgtgcacaggggagaaaggtgttggaaagagtggcaagcctcttcattacaaggggagcacattccatagaataatccccagtttcatgcttcaaggtggtgatttcactcttggtgatgggcgtggaggtgaatccatttatggtgaaaaatttgctgatgaaaatttcaagatcaagcacactggaccagggcttttgtcaatggcaaatgctggtcccgacaccaatggttcacaattcttcatcacaactgtcacaactagctggttggatggccggcatgttgtctttgggaaggtgttgtctggaatggatgtcgtttacaagattgaagctgaaggaagacaaagtggaacaccaaaaagcaaagttgtcattgcagacagcggtgaacttcctctgtaatgggatctgataagtgcaatatgt

SEQ ID NO: 1231 - DNA, 308 bp, Nicotiana tabacum
aagtctctcccggaaataatggtcaatatgcaccatttgttgctcctgccatgcaaaatgtatataatgcattagcagcagcagggttgcaagatcaaatcaaggtctcaactgcaacatattcagggatcttagcgaatacctacccgcccaaagatagtatttttcgaggagaattcaatagtttcattaatcccataatccaatttctagtacaacataaccttccactcttagccaatgtctatccttattttggtcacattttcaacactgctgatgtcccactttcttatgctttgttcaca

SEQ ID NO: 1232 - DNA, 487 bp, Nicotiana tabacum
gtttcttactctctcatttccattttagctatgactttatgcattaaaaatggctttcttgcagctgcccttgtacttgttgggctgttaatttgcagtatccaaatgataggggcacaatctattggagtatgctatggaaaacatgcaaacaatttaccatcagaccaagatgttataaacctatacaatgctaatggcatcagaaagatgagaatctacaatccagatacaaatgtcttcaacgctctcagaggaagtaacattgagatcattctcgacgtcccacttcaagatcttcaatccctaactgatccttcaagagccaatggatgggtccaagataacataataaatcatttcccagatgttaaatttaaatatatagctgttggaaatgaagtctctcccggaaataatggtcaatatgcaccatttgttgctcctgccatgcaaaatgtatataatgcattagcagcagcagggt

SEQ ID NO: 1233 - DNA, 367 bp, Nicotiana tabacum
caagtacaattgcagcattaagaaacctatctttgtccaacaaaatggacaaactattcttggtttcctcaaattcactgcccatttgaatctttcttttcattttcttcgctgatctcttctgtactgtctacttccctatcttctgtgacagcatttattggacgaacaagactagtttttgcagaaagagttgggatttgtagtgaattttgtcgggtgatgtgcggagaaaagttgatggagaagaattgagtatttctggattttgagggagaagggagggtgtgggtagcaaaatttttgagagctgacatgattggtaggttgttccgaaagagaaggaagttcccctcgtgccgaattc

SEQ ID NO: 1234 - DNA, 338 bp, Nicotiana tabacum
gcacaagtacaattgcagcattaagaaacctatctttgtccaacaaaatggacaaactattcttggtttccacaaattcactcccatttgattctttcttttcattttcttggcttatctcttctgtactgtctacttccctatcttctgtgacagcatttatgggttgcacaagactagtttttgcagaaagagatgggatttttagtgaattttgtcgggtgatgtgtggagaaaagttgatggagaagaagtgagtatttctggattcttgaatggattttgagggagaagagaggatgtggccatggtttgcaaaattgttgagagctgacatg

SEQ ID NO: 1235 - DNA, 122 bp, Nicotiana tabacum
cacactgctaggattactacttgttgccagcaccattgagatagcaggggctcaatcaataggtgtttgctatggaatgctaggcaacaacttgccaaatcattgggaagttatacagctct

SEQ ID NO: 1236 - DNA, 250 bp, Nicotiana tabacum
tgattaatattccactcaccaaagacctctgattctttttttattttcctttattaggttcacttttgtgttggctaatttgtgtgattattttgttagtggtgtaaagagtagattgttcattctaacatgatgtctagtgattttgtaagctgctgactgctgaacaaattttacatgaaattcttttcctcccagaataatacaaatctttgcacggtacttattgacctggttctctacctcaaaa

SEQ ID NO: 1237 - DNA, 441 bp, Nicotiana tabacum
gccaaacttaaataaatcctagatctcaaattgggacaccccagcaatttaaacaaacttttatatgtgcagtttgtcagtacccagtagtggtggagtcttttaatttgctggtctgaaaccttcttcttcatttttcacgaagccaaacaattagagctgaaagaatgagtctttctacagcaattacaacatggggcaacacctattttgcccttggaaataacggcagatccagattttactctcatggattcttacctactcatccgaaggtcaaattctccaccaacaacccttccccgctttctgtctcagctcttcttacaacaaaacaacaaactgatgaaagcaagaacaagaaaaaacaagcaatggagttcaatgattacgttcttgaaaaagctaattctgtgaacagggctttggaatcttcagtct

SEQ ID NO: 1238 - DNA, 468 bp, Nicotiana tabacum
cttttcttcactcttcgcccaagcaaataaccatgtcttgttacaagggaaaatacgccgatgagctcatcgcaaatgctgcatacatagccacccctggtaagggtatccttgctgctgacgagtctactggcacaattggcaagcgtctatctagtattaatgttgagaatgttgaggaaaaccggagggctctccgggagctgctcttcctcacacctggtgctcttcagtaccttagtggagttatcttgtttgaggaaaccctctatcagaagactgcatccggcaagccttttgttgatgtcttgaaggagggtggagttctccctgggattaaagtcgacaagggtaccgtagagcttcctggaaccgatggtgagacgactactcagggtttggatggccttgctgagcgctgccaaaagtactatgctgctggtgctaggtttgcaaaatggcgtgcag

SEQ ID NO: 1239 - DNA, 433 bp, Nicotiana tabacum
caggaatttatgggtagccacaaagaatcacttccaagcagttatggccaattagatacaggcttgaggcagtcttcttactctaacctaggcagtggctcctattcatcttcttcatacggcggacagcaatatggtggtggcggcagctatggatcatttggtgcaggagggtacagtagctacaggtcatgaacagattagccttgagtcttagcactcgtagttacccgtactgttttgttcgtatgcgttttgtgacagagcaaacactgaagcaactgcaggtggttcatgctatgttaatctgatgtctcttactgcaatgtattgatagcttttcagtagctcaccatatcttgtagttctcacatgtgtcggtatgataacattgaattttgcaagtgtaatggttaaggtgtggttcttaaaa

SEQ ID NO: 1240 - DNA, 331 bp, Nicotiana tabacum
  misc_feature (87)..(87): n = a, t, c, or g
gcccagaacacaagtacagccaccatagcaagaacatttccatcataataggattactcaagaacgataatgaaggattatacatangacctccaaaacaaaaggggacatgtttacatcacaaatgtgacgctagagccaaatggagaaactgcactacaaatgttctaaaggatgataagtagccgattttatcagcttattacagacggggcttgccagtttatttgacagagaagcctagaccacaaccctaaggtacataagtgatttagcgatactgaggagccagttccccatccttgacaatgtaattttgtgctgggaaatc

SEQ ID NO: 1241 - DNA, 129 bp, Nicotiana tabacum
gaaaagggtcctctgtttctcttaaactcatacgcaaccaaagggttcactttcatcaaagctcttgcaagatggcggatgttgaggatattcaaccacttgttgttgacaatggaactggaatggtcc

SEQ ID NO: 1242 - DNA, 325 bp, Nicotiana tabacum
gtaaagaatgcggtacaaacttcagcctccacaccacctacctttacccacccgatttttacttcgaagcaggcaataaaggtactctatctttctccgccgttgattccaccaaattcaagttcgaaaaagaagataaaatcaggcctttttttgagaccatcaattactggggtatccaaaggaaaaggaccaagatggcgtgcaataactgtgggaaggttgtgggatatgtgtatgatgatgggccgcccatgactgatagtccgggtcagtttcactttggacctagtcaggttattcctagagcccccagatataggat

SEQ ID NO: 1243 - DNA, 191 bp, Nicotiana tabacum
tggacttgggttgtgtgcggaacatggtggttctgttttcaaaccttttgttggagaggctctttcgagaatcaatgtagtgataacacatctacacgatcgtgagcctgagaatttaagtgcatattataatgctgcttttgcgcttggtaagatatgtcaatttcatcaggaaagtatcgactcagcac

SEQ ID NO: 1244 - DNA, 503 bp, Nicotiana tabacum
gtagcacctccaccaatgccaccaacagaaggtagatacgaagttgtaatagataatgacatcattcgacgacttgatttatccccatttcagattgcaactggattatcatcacccttatctgccaagccaaaagagtttctggaaaggacaattggttttacaatcaactacgcaaaagaagataaatatgatccaagggaattatcagaatttccagatatacgactatggttcgttcgactagatgctacttacccatggttgccagttttattggattggagagctggagagcttgcacgttatgcagcaatgttggtaccccatcagatgagtatgaaaatggggatagtattcaatccagaggcattggagttgtttgtgatgaataaggtgtttgttgtgtattcttggttgaagcaaaatgagattccaatgccaagactgaagacaaaagatatggcaagaatgcttggttttggaattggggatgaactttt

SEQ ID NO: 1245 - DNA, 444 bp, Nicotiana tabacum
gtttgactcaaccctctttaatcacaccatgaatggttcctatgtggttatttgtctccatgccccagaagccaaaaggccaaagggaagaattttacgaggaaataatcataggatttttacttttccattggctcagcctcaagtttagttgatgcagatctccaggaacatttcagagttgtatgaattgccataagatgatattcaatgtcttggggtgcattttctgctgtatctgccctgaaatttgatgcatgtggaattggtcattggtctgtatttttgtgtctctcacatatggaggaacagcctgggacctggaagatccacatcaggtcacattgttgcagagggtacagataaatcaatctggaggggtctggaacatacaactgtgagcagctctcttgacaatcaaatttggagatctggagcacccag

SEQ ID NO: 1246 - DNA, 382 bp, Nicotiana tabacum
gcggcatcactggatgcagagtacttcgtggcacggcacctaaacgtgagactcatgagtcactccccctgcttgtttactttttctgtgttgtttgacagaactgttgttgtgtcgctgaaactagtgtagttttcgtggtggtttcaaattaatattgtttcgtattgaccttagtttttgtgtcgtgtttctccttcaaaagaatcaaaatgtggtggagaagtaacgagaaaagacatttacccatcgccgaaggcccccatgctccaggatgcatcgacataatgacagaatattccaaagaagggtgttttgtccgactctactacccaaccaacatatcaatcactgacataaagaaaagagtcatcaagatggg

SEQ ID NO: 1247 - DNA, 565 bp, Nicotiana tabacum
agcacctccaaatgagtggcctgagattgtgggagatgataaatccaacctgcccttaaattcatttagaaacagagtcgaatctaaaagattttctataggaccagcatttatggagtggagcaagtctaaagctttggaacactctttagaccttattttgacctgattgcttttctccgcataatgctgtggaccaactgtaaatttttgatgacggatccatgtgcgttgatcattgttttttgcttcctccgattcataataataggttgcacaagctgagtgatccctgtcctccactgaagccaccacaaaacctctggaagcaagctcgcaacaaaaagtagtacagacaaaccggcaggccccgaatccgtgagagaaaattatcgttttgaacttatcttctttcaagagaggtggtcctttctcaatgacaggtatgtgaagattacctccagaaatgagccagatggaccatttgaggagagagacccagatgctgacgactgaagcgaatccttcctcgtagttgggatgagccatccaccgaaacccatct

SEQ ID NO: 1248 - DNA, 438 bp, Nicotiana tabacum
taagaacaaatgctagaatttttcagcttagcaagtgtactgcttgcacgttcacactcgaccttcctgctgtacacttcatgtgtatgcactcatttcatcagcgctgccttggcgacaatgagaaagaatgccccgagtgtgctcccgagtacagagctgttctggaaacaaagagaagcttggagcaaagttccaaaaacccagaccagttctttcaactggttcagagctcaaaggatggattttctgtaattgccgattactttggcaaggggattatcagcaaaactagcaatgggcatgctgaagctcttagatcaggcagcgcttcttctagcaacgatttctaggatttgatcaggactgatcatcaagctgtcagcatatttgttgtgtaaccatattcttgagatcttttcagccataattagggga

SEQ ID NO: 1249 - DNA, 164 bp, Nicotiana tabacum
ctatggtgaagtttgctcacgtcgttgctttcttgcttcttgcatcacttattcaacccctcactgctcgagatttggaaatcaatgtcttgcaacttgatgtgtctcagtctggttgcccaggagtgacaaaggaaagatggccagaacttcttgggacacca

SEQ ID NO: 1250 - DNA, 299 bp, Nicotiana tabacum
agcacctccaaatgagtggcctgagattgtgggagatgatagatccaacctgcccttaaattcatttagaaacagagtcgaatctaaaagattttctataggaccagcatttatggagtggagcaagtctaaagctttggaacactctttagaccttattttgacctgattgcttttctccgcataatgctgtggaccaactgtaaatttttgatgacggatccatgtgcgttgatcattgttttttgcttcctccgattcataataataggttgcacaagctgagtggtccctgtgct

SEQ ID NO: 1251 - DNA, 378 bp, Nicotiana tabacum
gcacctcctccagttgatatgtggctcatcttttctgcaagtcctaccttttcaactgcagctacagaatcaccaccccctattatggttgtcactccctttccactaagctctgccagtttctttgcaatagcctctgttccagcagcaaacttgtcaaactcaaacacacccattggtccattccaaataacagtcttggtggtatccaaggcgctgccaaatgacttgattgcatcgggtccaatatctaatcccatccagccatcaggaatttcagatgctggaacaaccttgctgttcgcatcagcagcaaacttgtcggcaatcactacatcagtgggaagcaatagagataccccttttgcctttgccttc

SEQ ID NO: 1252 - DNA, 500 bp, Nicotiana tabacum
gcacctccaccaaacccaccagcataagagccatagcgactagaatagccgagtgagggatctccacggtaaccaccaaattcaccaccgccaaagtctccatatctaccaccatattcaccaccaccatatccatagtcaccaaacctaccacccatacctccagaagacctataagaagcagggccaaaaccgccactgccaaaactgctgtatgaattgccaaagcctccgtaactatcactgtatccacgtcccctagactcactaccatagccatgaccagatgatgctgggtttgagggtttcttaggttctgccttcttgatctcaacctgggtacccagcatatcaatcatatttccctcggacagcacattatcaactactcctcgtgccgaattcggcacgagggaaagatacaaattatgaaacatagagtagtgacaagagggggcaaggacacgaagcggtcttcagtcttcttgatgcaaggaaga

SEQ ID NO: 1253 - DNA, 466 bp, Nicotiana tabacum
gcaaaattgaggactcttattgcattcaacaaagaaacgagtacacaacaatttctactgaagaataagtaaactgaactacaaacaacagcttttgaattcaaagttcatctatactgaaaccattttaaaaatagcagcctccattttttctctttagggtaagaggctgtaatacgtagaactcgggactctgtttaggcctgatcattcaacagaatcttataatcaaaagtacggcacttcacttgggcaatccggtataagggttgagaagagcttgactttcgtcgcttatcaaaactggacctctaccaggtcttgtgcatatgaagtagctaatttcgcccttacatttctgaactggaaccttgtccttaatttctggaggtggaggcaatgcttccacatcctttatctcctgaattccagcatccttcagtattgatttatcacctatgacgta

SEQ ID NO: 1254 - DNA, 191 bp, Nicotiana tabacum
gtcctcaatgaaagagagatcaattaatccgaaaagactagaaggtaggttcagcttggtaaatgaaagtgtaggaaacgatacacctaagaaaatgccaagcacaactccagcaaaggttgttacaagaagcctcatcatttcatttcgccgtttggtgtttgaactgcgtgtaggtgtccccattctgt

SEQ ID NO: 1255 - DNA, 458 bp, Nicotiana tabacum
tcatcaagaactctcaaaatattcagttgaaggaacacagtgggtgtctggtaccaacgggtatggatgcatgtgtgagcaggaaaatagcacgtggatggtctcttctgtacctttggcagggaatgttcaccatcaatggtttgatgtggggaattgggaggttgccagactttctgctggacttcttgcagcacaagctgtctcatcacttcagattgcagaagatgctccaatggactcatatgtcttcagtcggatgctgagagagtgaactgtggaggtctaacgtctatcatccagttggttggtactttatgagatgtttttttttatttgtgtggtttaggataattccatgtatatatatttttagtgaactcaatccgcattgtttttgacttattatgcttgtgtcggtcatgagcccttaaaattcactaaatagttcctggaaa

SEQ ID NO: 1256 - DNA, 341 bp, Nicotiana tabacum
agaactatgtgctgtcttaatcagactttcattaattgccttgcggacttttttacatgtcagaattcaataaaaattaacccaaataaatatttaaagaaatattttttaaaaaaacctcttactatggtacactaattaattaccttctccctaaggcctaagtttctccttttcttcaaggaaaatgaatcagaccctcttgtgttttgactttctgtgaagctactctgtatttacaattttaggtccctgaacatatcaagattgtgttcgccttgaacttggccgtatcctttggaatggtcaagctcatgcaataccgacatcagtgaggcctt

SEQ ID NO: 1257 - DNA, 374 bp, Nicotiana tabacum
ggtcactgtacgtattgccagaagactcactcacaacatccaaggactcacaagccttcagagagttggaattggactagtactctccgttgctggtatggtagcttcagctttggtagaacgactaaggagggaccgtgccatccatgacaacttcaaaataagagctttttggttagtccctcaattcttcattgtaggtgccggggaagcttttgcctatgtaggtcagcttgaatttttcattagggaggcaccagaagggatgaaatctatgagcacaggcctatttctcagcacactctcaatgggatattttgtgagtagcttgctagtgtcccttgtaacaaaagtaacaaaaggaagctggctta

SEQ ID NO: 1258 - DNA, 541 bp, Nicotiana tabacum
agcacctccaccaatgccacaaacagaaggtagatacgaagttgtaatagataatgacatcattcgacgacttgatttatccccatttcagattgcaactggattatcatcacccttatctgccaagccaaaagagtttctggaaaggacaattggttttacaatcaactacgcaaaagaagataaatatggtccaagggaattatcagaatttccagatatacgactatggttcgttcgactagatgctacttacccatggttgccagttttattggattggagagctggagagcttgcacgttatgcagcaatgttggtaccccatcagatgagtatgaaaatggggatagtattcaatccagaggcattggagttgtttgtgatgaataaggtgtttgttgtgtattcttggttgaagcaaaatgagattccaatgccaagactgaagacaaaagatatggcaagaatgcttggttttggaattggggatgaactttttgacttgattgataaacaccatattgatacttcataaagt

SEQ ID NO: 1259 - DNA, 449 bp, Nicotiana tabacum
gcaagcaagcagcattaaacttaataggctgattatttttccagatcatacagttcaaacaccataaatacaagatattttctagctaggctgagcactgagtcattacatcgaacaagagggcggggcgggggcggatgaaagagcttcgaccccaaactccgatccgtgtaacttttgcatgccatttcttaggtaagcagcttcttatgttttccaggttttcaaagaatttacaaggttactaagctatgacagctcactctatggatgacaggtcatttagccttcatcctctgatttagagtcataatctgagttgtcctcaagctttacctccacttcgaccacctgcactgggactgggaatgtgggtgcacttcctccagtaaaaaaggaagaagagggccaaccacgaacccttgacacgcacgccgtttcatcctccg

SEQ ID NO: 1260 - DNA, 360 bp, Nicotiana tabacum
caagcaagcagcattaaaccaatagttttgtagtcatgtaattaccaaagctatagccaagtggaagcaatggattggagctcatccacgtatcggttccatacctcaaagaagcattctttttaatgtccacctaaaattttccttccaattacaaatgatatattcttcagtggctcatacctgtgaagagttttgactcgcacatatttttcatggagccgtggaactgtattatctactctattatgtgcacaacatatgattcttgccttgtcaaattgaactgcatttatgcacttctacagttaaatccaattgatcattgttggccttccatttcaatgacccgttttatat

SEQ ID NO: 1261 - DNA, 480 bp, Nicotiana tabacum
agcaagcaagcagcattaaagttctcaaagttgatttcttcttcttcatcttcttcttcttcaaaattttcaagaagattattgttgttgatgtcattatcatttggcttgctcagctcaatcactttgttgtcatcactttcagattccatagcctcttctttcactgcaacacctctgttttctccattctcagtatacacctttgatttcagctcacgaatctctttcaagagagcttcattgtcatgtttgagagactcataattatgtttgagggcatcaaaattggctttaagaacaccataatctctctctaattgctttgttttccaacgagcacgtctgttttgaaaccaaacagcaacttgtctaggctgcaaaccaagttcttgagccaacttcactttcctttcaggttcaagcttattttcaacttcaaaattcttctctaaagcttttacttgttcaacacttagt

SEQ ID NO: 1262 - DNA, 476 bp, Nicotiana tabacum
taatgctgtgtgtactcaccttggttgtgttgtgccatttaatgctgcttgcttgcttcactaagggcgaattctgcagatatccatcacactggcggccgctcgagcatgcatctagagggcccaattcgccctatagtgagtcgtattacaattcactggccgtcgttttacaacgtcgtgactgggaaaaccctggcgttacccaacttaatcgccttgcagcacatccccctttcgccagctggcgtaatagcgaagaggcccgcaccgatcgcccttcccaacagttgcgcagcctgaatggcgaatggacgcgccctgtagcggcgcattaagcgcggcgggtgtggtggttacgcgcagcgtgaccgctacacttgccagcgccctagcgcccgctcctttcgctttcttcccttcctttctcgccacgttcgccggctttccccgtcaagctctaaatcgggggctcc

SEQ ID NO: 1263 - DNA, 240 bp, Nicotiana tabacum
tttagaaaacaaaatttatttgacgtcggtactgaaatttcatcagacttgaaggaagaatattttgatactaaagatcacaatccaagcttctgcgctagcattttaacttgaattatagacatacgcaagaccgggagggtttgtgtcctcttaaaaaggaatacccaactaatacgcaatacaatctggaacgcattgacccaactaattaggattcgtgcccccataggattcatt

SEQ ID NO: 1264 - DNA, 306 bp, Nicotiana tabacum
caacccggtgcacaaagcatcttgcattcacgcggggtccggaaagggtcgcacccgaagggtgtgaggtagacaacctacttaatgcaagaattagtggctgctttcactgctcgaacctgtgacctatgggtcatacagagacatcttgcatcaaactttccatttctaacgaaaatagagtccatttctgcaattcctcaaatgttagttcaatgccatcagataattaattcccaataacaccaatctgcggaaaaacctctacatttttttaattccctattcaaaactttttaaaaaaaa

SEQ ID NO: 1265 - DNA, 453 bp, Nicotiana tabacum
ttttacctaatctttttttataaacagaaccataactgttctgtacaaatgcttatcatgtacatgagtgaaggtagactttaatctagtaggaaagaaaatcatcaactgtcaacacctgtcatcaattgtcaactcctcagaccaactactgcattggcagcaggaagagggcttacacctcgatcatacattcgctggatctcctctctgtactcggtcaatgacttatgtggtatagctggagttaattctataacatctcccattcttagcttgcagttgggatcactgactggttcatggttcaatcttggccttagctcttctttcagtggaaatccatagggtgtccatctagaactgccgcgaccagctctctccaaaagatccttgacagttgagtttgcagggaattcttgcacagacatcttatcgttgtcaatcataatg

SEQ ID NO: 1266 - DNA, 331 bp, Nicotiana tabacum
tggacgttcaccttgtcgagaatgaccattcatgtaactccgtagctgcatcttacccagtgcattctcgggcctatccttgaatacccacatgtacatattctccatatcatgctgaaccatgaaaacgtcgagctgtagatcagatttatcaaacccggaaaccccattactatctcggaccatctttggcttagatttctcatttaaaacaggcttaaagtaaaagctaaagaaaaaccaagcgccccagatgctatctactcgtttcacacatttcctcccaactttaggcacactaagaaatgtttcaggttcatagatctgagtt

SEQ ID NO: 1267 - DNA, 340 bp, Nicotiana tabacum
ttttagtaagtaattatattaatcaaagaacaaatttacatcgctgttgactcatcaccttggttcactttgtttattcatcaaaacacatacatatacacacctccataataccaccaaaaacaaatgtaaaacaagtagataacagtaaatccaccccttgctacaccattggattattatccactgggtaagaagataacatcacatagcatagtactggtatttatttaattttccttaacacatgacaaagcttttattcattatttgatcacgtaaaccgttattactagacatcagttggaagttccaacttggaatcaaagggatgttgctc

SEQ ID NO: 1268 - DNA, 422 bp, Nicotiana tabacum
agcaacggaagcgcccaaatcagacttacagttgttagttttgaactgataattctgttaggaagcttatcttgttagaggaaattatgatggaaatcaattcagaagtaaaagaaagctccttaattttgattaagcaaggtgccgaggctagagtctttgagacatcttttgtgggaaagaggtgtatagttaaggaacggttctcaaaaaaatataggcatccaattttggacacaaagctcactctcaaacgattaaatgcggaggcccgatgcatgactaaagctaggaagctaggggttttaactccagttctttatgctgttgatgctatatcgcattctctgacatttgaatatgtggaaggcccttcggccccggccgccgaagggcgaattctgcagatatccatcacactg

SEQ ID NO: 1269 - DNA, 144 bp, Nicotiana tabacum
ccatactactactatactatcttttatgatcgtatgtgataataacccaaagttcacccttttttctcgctttatatattccaaatactctgtcatttaaatctcttcaaatctaaaactgagtttaattttgggcaaccaaaa

SEQ ID NO: 1270 - DNA, 390 bp, Nicotiana tabacum
ttttgtcaatcttaatcccttgaaagagatcaaccttcaagttttggttgaagaaactggcatctttaaacaagtgcaaattacatgcaaccacaatggaaaaaagaaagctagtgcagattgtatcttattgatcccaaattggtagcccacatccataggcgaacgtcatgccagagaagatgtaaggaagtcaacatttacaagattaagggttctcaactcaagacatctttaaactgcaaacataaccctttcagtcaccatccatttatctgtcgtcatcatctagtaacctccttgtatgaaggcattcaaccggttcagctcttccctgtgctcactcacgacagcacggacaacatctccaatggacaccatccctatcat

SEQ ID NO: 1271 - DNA, 343 bp, Nicotiana tabacum
agtcaagacgccccctccttcctcttctcgccgctactttccattgatcgaattttgacttagtaaaagcgatcgaagaagaagatgtttggaaggacaccgaagaagagcgatagcacaaagtattatgagatcttaggagttccgaagagtgcttctcaggatgatctcaaaaaggcttatcgtaaagccgccatcaaaaaccatcccgacaagggaggcgatcctgaaaagtttaaagagcttgcccaagcttatgaggttttaagtgacccggagaagcgtgatatatatgatcagtatggtgaggacgctctcaaggaaggaatgggtggtggagggg

SEQ ID NO: 1272 - DNA, 332 bp, Nicotiana tabacum
tacaaagccacttccagcagaagcttataggagctgtgtaatctataagatatttaacttaacgacaacattgaaccatacatctaatgtaagatgcttagccaaggcctattaagagaaagcaatgtgcacgcagggtgttaaaagagtggaacagccttttaccctgggatttaaacctcgtgcacatgtaataggctaatagcagaagttgtaaattaagatattttatcaatgtctttcatgcgtaaaataatctccaagcacaagttcatatttgtcaccagcgttccctgggggcgccatctgaataaccaggaatcaaattcttt

SEQ ID NO: 1273 - DNA, 421 bp, Nicotiana tabacum
ttttaggagcaaactaagagagagtctcatttatacaaaggttaatccccaaaatgagtagtacaaaataaagagaaaaaaagggctaaagagacaatcttcccatctaggaacctcaagtcaatttacaaagctgaggtccatttagaagatgaaaatgcttgaaacacaattaataaaacagcagcaattaacaaagataacaagtctttgttaatatagtctttttttttaatgaggtctaaaccttgtatactggccccaatttgcccaatttgctgcacttccaactcttggcatgctattcacttttgagtagacatcaaccttgaaataagctccacacattgatccttcactatctactcttggcattgctttcatcttgtaacttggatgctcatagctctttaatcctgtt

SEQ ID NO: 1274 - DNA, 271 bp, Nicotiana tabacum
ttttacatcggcaggtaacactttctcacattacccccgaattaataatttagcacttaaaattgagaaagtcatggcattcgtgatcataaaaaacaaaataaattaaaaatgacttagaattaattaaataaattagtggaaataaatgggctttgtggaaataaaacaaataaaaataaaaataaataaacaaataaataaattaataatacggtatttacaaggaattggtttttgagctaaataagattgaaaaaaatcaattact

SEQ ID NO: 1275 - DNA, 78 bp, Nicotiana tabacum
aatctcaaggcaactgagctcaggctcgggctccctgggtccctctctcccgaaaggggcatagagacttgccctttg

SEQ ID NO: 1276 - DNA, 231 bp, Nicotiana tabacum
  misc_feature (22)..(22): n = a, t, c, or g
  misc_feature (212)..(212): n = a, t, c, or g
ttttgccacaaaattttggaanaatccttccttatgataacacatttttgcagaagcaaaagggccacaacaatacacttctatgactccaagtcacaattcaaacatcacttgtacaatgaacctaaggtttcctatagaaacaacgagaaactaatagcttctctaattcaaacatcagtgctaccatggcgctctaatgtttcccacanaaacactatgagaaaccta

SEQ ID NO: 1277 - DNA, 369 bp, Nicotiana tabacum
ttttcgaaaaacaaaaagcataaactatttgggacgaagaaatatattattagtagaaaaataaaattggagaacacaatttattgtttatttatttatgtcatagttcacatatctgttgccttattataagtagtatacttgacaaacacaattacgtaatccatcacttcatctcttgagatgacactccccatgtttgtgaagctgtacgagaaagtccccaattttgatcccctgcaacgtgccatgcaaagtaacctagcaatcctctacctttaacataattaaccttatttctaacactttgagtatcatcatagctaatccaattacttccagagtaacaataatctccaacaatagtag

SEQ ID NO: 1278 - DNA, 195 bp, Nicotiana tabacum
ctattttgaccattgacgatggcagagagtggtagtagtggagaggagtcaaagaagctgcagctctactcatattggcggagctcatgtgcatttcgtgtccgcatagctctcaatttgaaaggagtggaatatgagtacaaagctgttaacttgctcaaaggagaacaaaccaattctgaatacttgaagctg

SEQ ID NO: 1279 - DNA, 346 bp, Nicotiana tabacum
aatataacatttcacaaatgatctcaagcgtggtcatagaccttattacaagcagaatccacacgactcttgtggctgggaattatttagactatttaattttacgaaggttaccactaacacttatagtctagtggtactgacagaattttcacgcagtaggtgcagattcaattctcactattcccctccccctatgtaacaataatgttttttctttaaataaaaaaaacacagtagacatgtttgcaagctcacaagtattttcttccagaaaatcagtagctcattgggtggtggattttaaggcattttgcctatagattttgagctttgacagcagcat

SEQ ID NO: 1280 - DNA, 372 bp, Nicotiana tabacum
tcaaatcatttccgatcaataagtgttagttccatacctcaaagaagcattctttttaatgtccacctaaaattctccttccaattacaaatgatatattcttcagtggctcatacctgtgaaaagttttgactcgaacatatttttcatggagccgtggaactgtattatctactctattatgtgcacaacatatgattcttgccttgtcaaattgaactgcatttatgcacttctacagctaaatccaattgatcactgctggccttccatttcaatgacccgttttatatgaagggcagctctcacaacgtttccccttgttattattcccaccagtttaccttcactatcaacaacaggaagccgtcg

SEQ ID NO: 1281 - DNA, 353 bp, Nicotiana tabacum
atttctcctatagtcatgggatttgttctcttttcacaattgccttcatttcttcttgtctctacacttctcttattcctagtaatatcccactcttgccgtgcccaaaattctcaacaagactatttggatgcccataacacagctcgtgcagatgtaggtgtagaacctttgacctgggacgaccaggtagcagcctatgcgcaaaaattattgcttcccaatttggctgcagattgtaacctcgtacattctcatggtcaatacggcgaaaacctagctgagggaagtggcgatttcatgacggctgctaaggccgttgagatgtgggtcgatgagaaacagtattatga

SEQ ID NO: 1282 - DNA, 483 bp, Nicotiana tabacum
catttataagtatcacaagagaacaaaagatggtagatctggtagacaaactgggaaaaactatcgatttttcgagcaattagaacttttggacaaccagattaataggatggatacaacaacattaatttcaatgccagtaccaatgcctatgccgatgacaatgataaaaccagctactagtggatgtcaagatttcagttatcgaaaccaaggtttcaatttcaatccggagttcatgtctacgtccacgtccacaaactcttcctcgggtaaggaatccgatggtagtgtgaagaagaaaaggaaattggctggttattttgagaggttgatgaagcaagtgttggacaagcaagaggatttgcaaaacaagttcttggaagcgatagaaaaatgcgagagggatcggatagcgagggaagaagcttggaagatgcaggaaatatcaagattaaagaaagaaaaagaagcactagccca

SEQ ID NO: 1283 - DNA, 424 bp, Nicotiana tabacum
accaaaaaattccaagaaaaaatggcacattcttgcatagccacaacttcatccgtctcaaaattcaagtacccgattgaatcttccactcttcccctagcccaccccgtttccctccctcttaaacatcttcccttcaggaaattaaagactgttgggaaagtgaagaataggggaaatagcacggtgaaatccgtgtattccggagctgagtgggtttcggctaagccttcacctacaggaatttggtctataagagatgatttgcaagttccgtcttcaccttattttcctacatatgcccaaggtcaaggaccacctccgatggtacaagagagatttcagagtgtgatcagccagctcttccaatataagatcatacgatgcggtggagcagttgatgatgatatggctaatatcatag

SEQ ID NO: 1284 - DNA, 489 bp, Nicotiana tabacum
atcgccatgagtgctcatcacccgtgattcgttgtgatctgaagcctagtaacgtcttgttggatgacaatatggttgcccgccttagcaactttggtatttcaaaactgctcggtgaagatgagactgatttgttcactaaaaccttagcaacattgggctatattgtaccagagtatggactggctggattggtgtcaacaaaatctgatgtctatagttacggaatcatgttgttggaaaattttacaagaaggaagcctaatgatgaaatgttcgatggtgatcttaacctgaagcaatgggtgagttattcaatcccagaggcagtaatggatgttgtagatgccaacttgttaacaccaatggataatcacttaaacaagaagctagattgtgtggcatcgatcatgaaagtggcactagattgcagtgctgaatctgctgcaagaaggatcgacatgaaaaatattgtagggatgctaaaga

SEQ ID NO: 1285 - DNA, 261 bp, Nicotiana tabacum
catgcatacctcaggcggtgttggaagccagagctaaggaagctgaggcggatgctgagaaacagaaaaggaaacttgagagagatctggagaatgagaacggaggtgcaggtgtttactctgccagcttgaggaagcactatctattagcaaatgaagagtggaaggaagatgttatgccagaaattttagatgggcacaatgtctatgactttattgaccctgatatcttacaaaggcttgaagaattggagagagaag

SEQ ID NO: 1286 - DNA, 484 bp, Nicotiana tabacum
gtttcaagagaattaaagtgatctgaaaatggcttccaatggaaacaatcatgtatcaacaaaaccaccaccagagccttcaccattgcgaaaggcaaaatttttccaggctaacatgaggattctggtgactggtggtgctggatttattggctctcaccttgttgacaaattgatggaaaatgagaagaatgaggtggttgttgtcgataattactttactggatcaaaggataatctaaagcaatggattggtcatccaagatttgagctaattcgccatgatgttactgagccattgttgattgaagttgaccgaatttatcaccttgcttgccctgcttcccctattttttacaagtataatcctgttaagacaattaagacaaatgtacttggaacaatgaacatgttgggacttgccaagcgaactggggcaaggattttactcacatcgacttctgaggtttatggagatccactc

SEQ ID NO: 1287 - DNA, 421 bp, Nicotiana tabacum
aaagggtataaactcaaagtccctacctttgtaatccacactagactttatgaatctttcaggcataaactccagtggcttatcccaggattttggatctcttccaattgcccaagcattcacgagaacttgagtgttcttaggcacagtgtagcccaacacttgtatatcattttgggctttgtgtggcaagagtaatgaaactgccggatgaagtctcattgcttcttttacaactgcttgaaggtatggaagtttctcaatgtctgattctttcactggtctttctgtgcctatttgttgaagtatttcttctcttactttgttaagtacttgaggttttcgaagaagttctgccattgcccattctgttgttatagcagatgtgtcacttccagcaatgaataaatccaccataaga

SEQ ID NO: 1288 - DNA, 515 bp, Nicotiana tabacum
gaacaaaagctggagctccaccgcggtggcggccgctctagaactagtggatcccccgggctgcaggaattcggcacgagggggatcttttctcttttcacaaatgccctcattttttcttgtctctacacttctcttattcctaataatatctcactcttctcatgcccaaaactctcaacaagactatttggatgcccataacacagctcgtgcagatgtaggcgtggaaccattaacttgggacaacggggtagcagcctatgcacaaaattatgtttctcaattggctgcagactgcaacctcgtacattctcatggccaatacggcgaaaacctagctcagggaagtggcgattttatgacggctgctaaggccgtcgagatgtgggtcgatgagaaacagtactatgaccatgactcaaatacttgtgcacaaggacaggtgtgtggacactatactcaggtggtttggcgtaactcggttcgtgttggatgtgctagggttaagtgca

SEQ ID NO: 1289 - DNA, 490 bp, Nicotiana tabacum
cttcaaccaagttgttatatttgtcaagagtgtaaatcgggcagcacagctggataaattactagtggagtgtaattttccatctatctgcatccactctggcatgacgcaggaagaaagattgactcgctacaagggtttcaaggagggtcacaagagaattcttgtcgcaactgatctggttggtaggggcattgacatcgaaagggtcaacattgttattaactatgacatgccaggttctgcagacacttatcttcacagagtgggtcgagctggtaggtttggaactaaaggccttgccatcacatttgtgtcatctgcatcagattctgatgttctaaatcaggttcaagaaaggtttgaaatagacataaaagagcttcctgagcagattgatacttctacatacatgccatcttagcgatctcgagagcttccagcaatatcaagtcatttcggctaaaagatggggggacctgacaggtgt

SEQ ID NO: 1290 - DNA, 431 bp, Nicotiana tabacum
ttttagaaaaaaatttaacttttatatattatcagtgtaaaagaactttctgacattatagacaatactgttaacttttacaatcttgtaattggaggatagagttggccttcaaattttacatggtcctagcaacattattggcttccccttccttattcttaagtagttgcatgacatcttcaataagcaatttggtattcaagaacgaagatccttcttcttttattaccattttcgacatgtgtgccaactcctttgttctttttcttctttcttcaccctctaatcctttatccattagttgatctattgcttttttcacttgatccttattaaccaacactccattcttctcttcattccaagaattaatactcacttcaaccccaactcgaaccccaatcttcaaaacatttacaatgaatttc

SEQ ID NO: 1291 - DNA, 530 bp, Nicotiana tabacum
ttttcctagtcagttcactggttacagttaccttgtaatcctgcatggctcattaaggttgttaaatatacttttaatttcctgatttgagaaagaatttttttttatagtggctttacttgcacaacttgataaaaaagaacactacattttctgtatggataaacgtgtgaacaagttaggtgctgacacttcagcttcccatttccttggacctagactaggttttggttcaacatagcagaaggttggtcaagacgacaaaaaggggaggggtgaatagaaaagatatcttaggtgtatcactcgtccttagaacactgccaacccaattatatatgtccctgtgtgtgactgttcaatttttagacgattagaaatgcttttagtacaatttatcagtttgacctcttatggtttgctccttttgttcgtgtgttactcatccgtctctaaggtctcactctaggttaaagtttacaggtaaggagtttgatgcatatgcaaaagttgttgttaatgctgctggg

SEQ ID NO: 1292 - DNA, 163 bp, Nicotiana tabacum
ttttgataaaatcctgaatacagaattataaagtttgtccaatcaacaagttatacagaggaagtttagcagaaaaagtggaaacaaaagacataaattaacatcctaatacatccacagctaatcaaaaccgaaacaaacagagtacacaataatcactaga

SEQ ID NO: 1293 - DNA, 452 bp, Nicotiana tabacum
tagtcagttctagcctccttttccttagaaataatggattatcatatttctttccattttcaagctcttttagggcttttagcctttgtgttcttgtctattatcttatggagaagaacactcacttcaagaaaattagcccctgaaatcccaggggcatggcctattataggccatcttcgtcagctgagtggtactgataagaatatcccatttccccgaatattgggcgctttggcagataaatatggacctgtcttcacactgagaatagggatgtacccctatttgattgtcaacaattgggaagcagctaaggattgtctcacaacgcatgataaggacttcgctgcccgaccaacttctatggctggtgaaagcatcgggtacaagtatgcgaggtttacttatgctaattttggtccttattataaccaagtgcgcaaactagc

SEQ ID NO: 1294 - DNA, 272 bp, Nicotiana tabacum
tgttattttcctattattattatttgttacagtatttaaacaatctaacaaaaccttcatggccatgaaatttttttcacctttttttcgaaatcagtgtttggcgataaaattttcaattttcacttgaagatgaattttaaaatttttcgaaaatttgaaaaactccaaaaaaccttttttcaaaattttaactcagatcacttacaaaaattaaaaacaacccaaaattatattcatgtccaaacacaactctaatttttaaataccat

SEQ ID NO: 1295 - DNA, 437 bp, Nicotiana tabacum
tcagaaccttttttaattgaaattggtgacaggacgaagattacggcaggctgtaaattcaccaaccatgatggtgcaatgtacgtgatccgaagcatggaaaagtatgaagatgcccggaattttggcagaataaaactcggaaagaattgttttgtaggaaataactgtatttttcttcccggctcacaaatgggcgacaattgtattttgggcgcaggatctgtactgaattccagtatgcccaataattccgtttatgcgggaacccctgcaaaattcatttgtactgttgaagaatacggcgataaagctttggaaaataatgtaatgtaccccagagaactggaacccgacagagcaaagcttgaagcatatattaaagaacacatccctcatgtttacaaacccgtaaaaaaataaatggctgaaaaaaa

SEQ ID NO: 1296 - DNA, 454 bp, Nicotiana tabacum
cattgagggattgatcagaacgtaaataaaatgaagattcggattgatacattttgcccaaatctgaaatgtggaaagccattttccactttctctgtaaaaatctttctgaagagtagaatagtgatctgccatataacaaaggtagtaaatcttgtattttaagttgaatttaattataatccgtctaaaattgaagtaattttgttcacggaattttcaagattgaaaggcatttcataatctttcagcttctccgaatatttatcaaaaaattcaggttgagataatgcttttttcattccgtcataaattccttcatccgagttttcaacaattaaccccaattctccattattcagcatttcgttcgctccggaaacttcagtggaaataattttctttttcagggtgattgcttcaaagagaacggttgggaatccttcatatcttg

SEQ ID NO: 1297 - DNA, 345 bp, Nicotiana tabacum
attgatcagaacgctttggatttggattaatcatctcaggctccttaccagtacagggcaacaaacaggattactatggtggcaaccacagttaccgcccagagacttttgataattggctctggtcccattttttcgtcttttacaatgatattggccgctttcggtgccagttcaaaccaggttttggtgtgcagcagagctgccgccagagtgatcaggttaatgatcaccgataaccgggttttgtaaaaaggtcgacgaatcccgcccaggcttccgggccatttttcagggcaaacagcccgaaaatcagttcaatgctgaaccacacagccggaaccg

SEQ ID NO: 1298 - DNA, 447 bp, Nicotiana tabacum
gatcagaacatagattttcaggccacaaagcaattttgtcaggtcctgctggtggtgtagttggttactctcagacactctttgggattgaaacagacaaggccctaatcggttttgacatgggtggtacctctactgatgtcagccgatatgctggtacctatgaacaagttatagaaacccaggttgctggtgcaataattcaagcacctcagctcgatgtaaacacagtcgctgctggcggtggatcaaagttaaaatttcagtttggttctttccgggtgggaccagattcagtgggtgcacacccaggaccagtttgttaccggaaaggcgggcaactagcagttacagatgcaaatcttatcttaggatatgtcattcctgattttttcccgtccatttttggtcccaatgaggaccagccattagacattgatgctacga

SEQ ID NO: 1299 - DNA, 604 bp, Nicotiana tabacum
attgatcagaacaagggtaacgaagaagtttggtgattccttcttcttgaaaagttcccttctcaacaagcttgaatgcttttattgctgctccttcctcccatatgaactttgagaaaggcggcatacttccaggagtaatacctccaatctctgcatgatgccctctacttgcaacaaagaatatcaatctacctttgttaaaaacaggtgtaattacagttatatcaggcaggtggctaccaccagcagaagggtgattggcaactaaaacatctccctcatttagattatcaccccagtgcttcagctgccaccgaacagtgctcgacatagcccccaagtgcacaggaacatggggtgcatttgccacaagcccaccatcagggccaaaaagtgcgcaagaaaagtctagccgctctttaatatttgttgatatagaagtcctctgcaaggtgcgccccatctgttcagctattcccataaaccggttgttgaaaattgagagctgcacaacatctgcaactttttcatctacttttgcagtattggaagccgactcgatctctattttaatgttgccatattttgtaataatggcctg

SEQ ID NO: 1300 - DNA, 481 bp, Nicotiana tabacum
gaaacccgcattaaaggtctgttcgccgtgggtgaatgttcctctgttggtctgcacggtgcaaaccgtctgggttctaactccctggcggaactggtggtcttcggccgtctggccggtgaacaagcgacagagcgtgcagcaactgccggtaatggcaacgaagcggcaattgaagcgcaggcagctggcgttgaacaacgtctgaaagatctggttaaccaggatggcggcgaaaactgggcgaagatccgcgacgaaatgggcctggctatggaagaaggctgcggtatctaccgtacgccggaactgatgcagaaaaccatcgacaagctggcagagctgcaggaacgcttcaagcgcgtgcgcatcaccgacacttccagcgtgttcaacaccgacctgctctacaccattgaactgggccacggtctgaacgttgctgaatgtatggcgcactccgcaatggcacgtaaagagt

SEQ ID NO: 1301 - DNA, 484 bp, Nicotiana tabacum
gcgaggctttgtgcttctctggagtgcgacaggtttgatgacaaaaaattagcgcaagaagacaaaaatcaccttgcgctaatgctctgttacaggtcactaataccatctaagtagttgattcatagtgactgcatatgttgtgttttacagtattatgtagtctgttttttatgcaaaatctaatttaatatattgatatttatatcattttacgtttctcgttcagcttttttatactaagttggcattataaaaaagcattgcttatcaatttgttgcaacgaacaggtcactatcagtcaaaataaaatcattatttgatttcaattttgtcccactccctgcctctgtcatcacgatactgtgatgccatggtgtccgacttatgcccgagaagatgttgagcaaacttatcgcttatctgcttctcatagagtcttgcagacaaactgcgcaactcgtgaaaggtaggcggatcccc

SEQ ID NO: 1302 - DNA, 543 bp, Nicotiana tabacum
cattgagggattgatcagaacgtaaataaaatgaagattcggattgatacattttgcccaaatctgaaatgtggaaagccattttccactttctctgtaaaaatctttctgaagagtagaatagtgatctgccatataacaaaggtagtaaatcttgtattttaagttgaatttaattataatccgtctaaaattgaagtaattttgttcacggaattttcaagattgaaaggcatttcataatctttcagcttctccgaatatttatcaaaaaattcaggttgagataatgcttttttcattccgtcataaattccttcatccgagttttcaacaattaaccccaattctccattattcagcatttcgttcgctccggaaacttcagtggaaataattttctttttcagggtgattgcttcaaagagaacggttgggaatccttcatatcttgagcttaaaatataaaaatccgcttttttgaagtatggataaggattatctgtaaaacccagcatggttgctgtttcatcaacaccaaga

SEQ ID NO: 1303 - DNA, 437 bp, Nicotiana tabacum
ccggaagcataaagtgtaaagcctggggtgcctaatgagtgagctaactcacattaattgcgttgcgctcactgcccgctttccagtcgggaaacctgtcgtgccagctgcattaatgaatcggccaacgcgcggggagaggcggtttgcgtattgggcgctcttccgcttcctcgctcactgactcgctgcgctcggtcgttcggctgcggcgagcggtatcagctcactcaaaggcggtaatacggttatccacagaatcaggggataacgcaggaaagaacatgtgagcaaaaggccagcaaaaggccaggaaccgtaaaaaggccgcgttgctggcgtttttccataggctccgcccccctgacgagcatcacaaaaatcgacgctcaagtcagaggtggcgaaacccgacaggactataaagataccaggcg

SEQ ID NO: 1304 - DNA, 534 bp, Nicotiana tabacum
cgcgacgcctgggtcatcttcctcctcgacggattcgacgacggggagtggctgttttttgaagaaatagtgttgtgttgattgtttaaaagcgggcgtttcagcctctacagtgacttcggcttttactatccaaagcacccatagctgcctggcatacccaccaaccagcaccattcctgcaaaccacaggcaaatcagtaataaacaaattacatatattatggtgctgtgtttttgtcgggagaagataccagggtgacctgtttctttctgctcacgcgcggcgatatagaattcaaacatgtcatttccccttcactgttgtttccggggaaatatttgcttcatcccgatataagtaggcactctcccctgccacctgccagagatgtactaacgttgaaaagccaacaacaccgtcagttttcaagtggtggcttttttgaaattgctttattttttctaccaacaagggacgccactccgccgaaggttctgtcgaaatatgcaatgcgcggtttaacatcgttt

SEQ ID NO: 1305 - DNA, 426 bp, Nicotiana tabacum
cagaactcgtacaaagtgaacaagcagtggctgcgttatgctggtcataccgccagtgatgaagtgtttgaaaaactgaccggcattaaaggtgcgttccgtactcgtattgcctacgttgttcagaccaacggcggtcagttcccgtatgaactgcgcgtatctgactatgacggttacaaccagtttgtcgttcaccgttcaccgcagccgctgatgtctccggcgtggtcaccagacggttctaaactggcttatgtgaccttcgaaagcggtcgttccgcgctggttattcagacgctggcaaatggcgctgtacgtcaggtggcttcattcccgcgtcacaacggtgcacctgcattctcgccagacggcagcaaactggcattcgccttgtcgaaaaccggtagtctgaacctgtacgta

SEQ ID NO: 1306 - DNA, 405 bp, Nicotiana tabacum
acaccttgccgatcagccaaacgtctcttcaggccactgactagcgataactttccccacaacggaacaactctcattgcatgggatcattgggtactgtgggtttagtggttgtaaaaacacctgaccgctatccctgatcagtttcttgaaggtaaactcatcacccccaagtctggctatgcagaaatcacctggctcaacagcctgctcagggtcaacgagaattaacattccgtcaggaaagcttggcttggagcctgttggtgcggtcatggaattaccttcaacctcaagccagaatgcagaatcactggcttttttggttgtgcttacccatctctccgcatcacctttggtaaaggttctaagctcaggtgagaacatccctgcctgaacatgaga

SEQ ID NO: 1307 - DNA, 507 bp, Nicotiana tabacum
tgattccatttgcgccaaaccctcgcttagcacagcgaagaagaaggaataataatgaaaatggaaagtatggtgtgacaggtctatgagtcaaaatcctaacgatccaaatgaacagaaaaaaagcaaccctttaaaagacgcaacttcccattttattaagataaaaagggatgaaagcaagcgggaaaatggcaaaaatggcaggaaaagcaggaagggcggcagcgaaagctgctgccaaactgctaagagctggtgtagtgaaaattgtgggatgctattgtgggatgccgtaggattacctgttgctctcattatggctcttattattactgtatgtgttattttagcatcttttgtaccatttaccgatgatgaaagtaaaacagaagaacaagtgaaaaagtatatggaaatttcaatggcgctaaacgtagactggaaagaggttgtcgcttttgacatggcgcggtttgataaatgactggactggtaaaagatccg

SEQ ID NO: 1308 - DNA, 479 bp, Nicotiana tabacum
gaacaagcagtggctgcgttatgctggtcataccgccagtgatgaagtgtttgaaaaactgaccggcattaaaggtgcgttccgtactcgtattgcctacgttgttcagaccaacggcggtcagttcccgtacgaactgcgcgtatctgactatgacggttacaaccagtttgtcgttcaccgttcaccgcagccgctgatgtctccggcgtggtcaccagacggttctaaactggcttatgtgaccttcgaaagcggtcgttccgcgctggttattcagacgctggcaaatggcgctgtacgtcaggtggcttcattcccgcgtcacaacggtgcacctgcattctcgccagacggcagcaaactggcattcgccttgtcgaaaaccggtagtctgaacctgtacgtaatggatttggcttctggtcagatccgccaggtgactgatggtcgcagtaacaatatccgaaccgacctgg

SEQ ID NO: 1309 - DNA, 348 bp, Nicotiana tabacum
acgctcggttgccgccgggcgttttttattggtgagaatcgcagcaacttgtcgcgccaatcgagccatgtcgtcgtcaacgaccccccattcaagaacagcaagcagcattgagaactttggaatccagtccctcttccacctgctgatctgcgacttatcaacgcccacagcttccgctgtcttctcagttccaagcattgcgattttgttaagcaacgcactctcgattcgtagagcctcgttgcgtttgtttgcacgaaccatatgtaagtatttccttagataacaattgattgaatgtatgcaaataaatgcatacaccataggtgtggtttaatttgatgc

SEQ ID NO: 1310 - DNA, 314 bp, Nicotiana tabacum
cagaaccgggccatgttaaacaccctgaatgttggtccaaccctggatccgcgttttcagacctatcgctatttgcgtacgccggaagaaccggtaaaacgcgatagcccacgtcgtgccttcctgatgattatgtggggcattgtcggggggctgatcggggctggtgtcgcattaacccgccgttgctcgaaatagcaacactgctgcggtgagcgcaaaggcgctcgccgcttattcgaagagaatcgatgtgaaagtactgactgtatttggtacgcgccccggaagccatcaagatggcgccgttggtg

SEQ ID NO: 1311 - DNA, 324 bp, Nicotiana tabacum
ttttaaaaacgataatccaaatgcattcttgatctatataacatctagacaaaagtacatgtgactcttattcatgtcttatgtttattacagcaaagatcatctcttgaccacttcaaccaaaataaacaaagtgtgtaaactataaaagcgagacaaaataaattgtcccacactaacgctttcacgcaataattcgaccaaagatgatcttattagaggaatgaccgttctacttagccacttcatcacttccaggcatttccaaggggaaatttgggtgagcttgaccattaggacagaagataaccttataatttgtac

SEQ ID NO: 1312 - DNA, 302 bp, Nicotiana tabacum
gtgaattttgtaggaaaaagaagaagaagaagaagaagaagaagaaagagagagatggtgatggaagaaggatgtcaaacaccaagaagcccagaagcaaaggtaggtatgcaagtggaagatctatgggatgtacaagaaccacagcttagtcctactgagaagctcaacgcttgtttcgagaacattcctgtttctgattttcctcctgctccttctaatcaagtaattgagataagatcagatgcaactttggccgaagctgttaagttactatcgcggcacaaaatactaagtgcacc

SEQ ID NO: 1313 - DNA, 305 bp, Nicotiana tabacum
tcgtagcacttttcaactcagaactcatattttggaagatgcacaaggtgttatttctgttgttaagatgaacttccctcaatgacaatgttggttgatattcacggccacttttcgactgtgcaatattatcttcagtataatctggaacatggtagctttaccattgcaaaagatagtttcttaacatgtatttgttcagcattctttgctcttcttcagagtgcagaccatgcttttgacccaataattatgtttgtttcatagcctctcttaggtaagtaggatttgcttttatcctaaaa

SEQ ID NO: 1314 - DNA, 301 bp, Nicotiana tabacum
gggcatttggagataatgaccctgttgatgttgttgagattggggaaagccgtgctaaagttggccaggtcttgaaggtcaaacctttagctgctttggcaatgattgatgaaggagaacttgactggaaaatagttgctatttccctagatgattcccgagcgtcacttgtcaatgatattgatgatgtggagaaacattttccgggcactctgacagctatcagggactggtttagagactataagatccctgacggaaagcctgctaacaagtttggacttggaaacaagccagctaa

SEQ ID NO: 1315 - DNA, 387 bp, Nicotiana tabacum
ctggctgatcttcaaaaggacgatggatcaggctttcaggaagatcaggttgagagcagaggatgtacaaggaaagaatgtcctcacaaacttctggggaatggacttcacaacagacaagctgaggtcactggttcgcaaatggcagactctgattgaggcccatgtggatgtcaagacaacagacagctataccctgaggatgttctgcattgcttttacaaagaaacgcccaaaccagcagaaacgtacctgttatgctcaaagcagccagatccgtcagatccgtaggaagatggttgagatcatgaggaaccaagcaagttcatgtgacctgaaggagttggttgccaaattcatccctgaatcaattggcagagagattgg

SEQ ID NO: 1316 - DNA, 529 bp, Nicotiana tabacum
gttcaccccattacagactgcatctttaggcttttctgccctaaaccaacaagatttaagcaaatctaagtgaaccagcaaggacaaaaacaggtatgtcgtcttcggaaaatccagagattgttgagagggttttcgggaacaaggagaaggaggagaaagaagacaagaaagatgagcaaaagggtgggtttattgaaaaagttaaggactttatccaagatattggtgagaaaatcgaagaaacaattggttttggaaaaccaactgcagacgtaactgaaattcatattcctcatatcaatcttaaaaaagctggaatagtcgttgatgtgcttgtgaagaatccaaacccccgtcccaattcctctcattgacataaactatttaattgatagtgatggaaggaaactggttactggattaatccccgatgctggaacaatccatgccatggtccagagactggtcaaaataccagtttaatcggtttaatgaatgacattcaaaaaattacattaccacgata

SEQ ID NO: 1317 - DNA, 277 bp, Nicotiana tabacum
cacttgagaaaactggcgagattcctataccttgcaagccagatattgatcttgagaaaatccattttgagaggttctctttcgaggaaactgtagcagttcttaagttgaagctggaaaacaagaacaattttgatcttgcgctcaatagccttgattatgatctttggctatccgacgtcaatgttggcggtgcagagctggagaaatcagctaaacttgaaaagaacggaatcagctatattgatatccccataaccttcaggccgaaggactt

SEQ ID NO: 1318 - DNA, 258 bp, Nicotiana tabacum
cgaagatggtttttctattaacttgcttttctttctgttttggggaggagccacgagcagtgaatgggttgtgaactatgcataatatgccagttttgccagtttatatatatattaatatacatgtaggtatatgatagtagctacataactttgaatatgatcttagttctcattgtaacatagtccatttttcttgttcatgtgtaatatgtataaaaggtcttttgggaatggatccgatttaacttctttcat

SEQ ID NO: 1319 - DNA, 296 bp, Nicotiana tabacum
gagaaatttggcaactttagcatagaagcagagtgtcctaagattgtggaatgggcaaaaaagtgtgtgcaaaaggagagtgtctcaaagtctcttgctgaccctgacaaagtctatgattatattgtgatggcgagacaaaagtggggcattgcctaaaacaaaaaagacggatctagagtgggttctgcaatcaagtgaacttgtttcttgttcgaactatgtattcatatacaaagattttaaaaagtatacatatagtaataagtttcctttttactttcctttgaaatgga

SEQ ID NO: 1320 - DNA, 419 bp, Nicotiana tabacum
cgaaacattccccaaattaaccaaacgaagaacacatcggtagctgacgtctggaccggcggaatcacagttgctgttggttgttcaatcgttggagcaagtgtcttccaatcaacatcatgagaaaaccaatacttgatcgtcttattgacgctgggattggtactatagcaaagtgtataacttctagcctgagaagaaaagatggcatcttgcaccaccccgagttcaatcaatccattgccgaatatggtcagacattcacccgtaagcgtgttaacgaggaagatgcaatgctgataggtgtcgatgttttcgtccgttatacggtgataggttctggagttgtcgctttcatctatcttgtgaaaagtcatttcaactggctgaatcaaagtaagttggagatggagcgacgc

SEQ ID NO: 1321 - DNA, 404 bp, Nicotiana tabacum
agggtcgtctttgacacattcgagccaaaaacaataagtttagctgacctcacagaactaagttgagatccacgtctcaatataatctatagataatttttagggataagataaagttcgtttttcttatgcatggtaattccaggcctggcgtttgtgtcaatgtcttcttttttcattcccaaaggtaactcccaatcaaatgcataaagaagatttgacaatgcaagttccattgatgcaaccccaagtgcaatacctgggcaacctcttctgcctgcaccaaatggaattaactcaaaatctttacccttgtaatcgatattgctattcaagaatctctcaggtataaattcttctggattttcccatatttcaggatccctcgcaatagcccaagcgtt

SEQ ID NO: 1322 - DNA, 284 bp, Nicotiana tabacum
cttattttccttctttctaaatccaagaatggtggaaaaaccacactgccaccagaatgtgttggttgcaggatcagacactagtgcagctgctactgtttgggcaatgacagccttgataaaaaatccaaaaaccatgaaaaaagttcaatcagaaatcagaaaatcaatagggaagaaaggaattgtaaatgaagaagatgtccaaaacatgccttatctcaaagcagtgataaaggaaatatttagattgtatccaccagttccacttctagttccaagag

SEQ ID NO: 1323 - DNA, 572 bp, Nicotiana tabacum
ttttagacaaagaactacgtagaggctgcaatcagattatgagttgcaactatacaatggattttgggtgtaaattataaccccaaatccatgtgatacatctatttcgaatcatacacaaaactgttgaataattacatggaatacaataacaagcaaaagggaggctgcatgtaccgaaaacaggaaagaaaatcccctttgaagccacaaaatttattgctttgggaatcttcctcttatctatggtgactaaatgtctccgaaacagaagctctaccccttagtctcatatctatagatagcctaacagaagatggaaggaatgcatggataagcttacgagagggagccatatgaggctcttctttcttatttctcctctgcctcgacgtcccagctgtagtttttgtacttctcaaagatcgtgattttggatcaaaatttgatgaagtaaaagaagcctcagctacattgaatgatacaggaccgttgtgtgatgcatcaagaggtatccgactgctccatcttgatgtggcggagatattctcactcttggctctttagcattg

SEQ ID NO: 1324 - DNA, 251 bp, Nicotiana tabacum
cagcagttctgttcgtggtggttgcattctgcttcttgattatgctttacaaattgatgttctcctggtttattgaggttctagtggttctgttctccattgggggtgttgagggtttacaaacttgtttggtcgctttgctatcatgtttcagatggtttgagcgttttggagagtccttcattaaaattccttttctggggcctgtttcatatctgacgccggcgatttctccattctgcattgtcttt

SEQ ID NO: 1325 - DNA, 271 bp, Nicotiana tabacum
tacggtggcggcggtggcggttacggaggtggccgccgtgatggtggttacggtggtggtggaggttatggaggtggccgtcgtgaaggtggttacggtggtggctctgaaggaagctggaggagtaaattttccgttgccttcagatcttttgttcgaaatttatggttctaagtttgttgaagttccgttatggttactgttgttcctgttactgtcctcgtttttgaccgcgagattgttaccgtgatgttacctttgtggatctgtt

SEQ ID NO: 1326 - DNA, 306 bp, Nicotiana tabacum
ccattgctagcaatggtggaagagttcaatgcatgcaggtgtggccaccaattaacaagaagaagtatgagacactctcataccttcctgatttgagccaggagcaattgcttagggaagttgattaccttttgaaaaatggatgggttccttgcttggaattcgagactgaggtcaacgtctattataaatcttgctactattatcaagcatatatacctaacatgaattactcaatcctaactaatttgggatcaaatgtagttgattaatggtatttatttcatgttaatgttttgtttaaaa

SEQ ID NO: 1327 - DNA, 162 bp, Nicotiana tabacum
attgggtttttgttattgggcttactttgggccttagtaatcttgcccaaaagggatatgaggcttgataaattctttggagttgggcttttggctatttactcttgcttcttgttcctaaaacttgctagagctttgggcttccttgaatttcaagtgtcc

SEQ ID NO: 1328 - DNA, 333 bp, Nicotiana tabacum
gataggacaaggaaattttataagagtgatatttataagaaatttagagaacaagctaaggctgctgagatggaaatggcagtgggacaaaatggaggtgttgttcaaagtaatacaactagtaagggatagattggaatgaagtaagaagacaaaatattgaagaaaaaaagaaatggagaaaagtcaaagagaaaagagagattagatagattttgttattatttgaaatatactacatggtataatatttataccatatagctttgtaagtgtgatggatcaatttaatggacatgaaatatagttttgatgttttctcttacatgtaaa

SEQ ID NO: 1329 - DNA, 331 bp, Nicotiana tabacum
atgggggtggagcttttatctgttgtgattgtgatgagcagggctatggatgggcttaccaatgccttgagtgtggctatgaggtacaccccaagtgtatcaagcccgtggcgcgtagcccgggcagctaattagttattgggctgatcttagcattcttacatgttatgtaggtaccagataaataggcaaagaatacaatatgttataattggtataaagtttgtcttactgataggttatggtgaatctttaatggtttctatttatgctcttttcaacttgtaattcttggttttagcagaaatcaaatatgagcctttgaagaaaa

SEQ ID NO: 1330 - DNA, 290 bp, Nicotiana tabacum
aattccacaacctttttcttcgctgtaagaaagaattggtgtttggcttggatttttgtggttcattagttgctaaattgacataatcacatggttcacagtcaccgctgatcttcgctcagaattcctttggcttctgcttcttcgttgtaacagaaaattagggttttgtttggggttttgtagttcagtagttcctcaattgacataatcatatggctgaaaggtacaactttcctatggcaagaaatactgaagctactgccaacgagtccaaaaatgaatctaag

SEQ ID NO: 1331 - DNA, 317 bp, Nicotiana tabacum
ctatctcaggccactatctctgtgcaaattgattttgggaagcgggcagacagagggatgacttcagggccatcaattgcaaaggataacgagaatcctccaccctctggtaatcaacatatggatcatttcggggaggcaaacaatgatgaagatttggaccaagctcaaaagaggctaaagatatagatatgataatagcatggtcatatccagctaaatcaacgtagttttttatgtcatcttgtggttcaaaagaaagtcgatatgtatatcccattcgttttttatcatccttgagtcatgtttatagcaaa

SEQ ID NO: 1332 - DNA, 553 bp, Nicotiana tabacum
ctaagaagaagggtaagggtaaaaataaacccaagaataactactgcgctaagggtggtgtgaccaaacccaaaggcaagacaggcaaaactgaccaatctgatgttgaatgtttccattgtaagaagataggacattggaagagaaactgcctggagtatcttgcaactctaaatgataagaaacaaggtaagactcaattggaaaatgttttcaaagtttctttaactactactgatgtttcattgtgagtattagatactggcagtggttataacatctgcaatatgttgcaggggttcgaaataagtagaaggttgaagaaaggagaaattaatctatacgttggaaatggtccaaaagttgcggccataactgtagggtcaatttctttaataatgcgtacgggcaaagtacttatgttggatgattgttattacgttcctaaatttatttcgaacataattttaacttttatgttagataaacgtggttttcacataaatatagacaatggtatttgctctatttattatggtgataatttataaaa

SEQ ID NO: 1333 - DNA, 257 bp, Nicotiana tabacum
tttaaagcacgttccggcgaacaagcacaaaagggaaactaccgatcaatcaattaaaccggcgatggagatgaaggaagggtctgtaattcatcaagtcctcgttaaacttctcgatgggaagcacaaaaccctaaatttcagtaccccatccatctcgaccctaaccctaaagcagaaaatccaagccctaacttcaatcccttgtcaccttcagctcctgctcctttccaattcattctaccccctacacgacg

SEQ ID NO: 1334 - DNA, 233 bp, Nicotiana tabacum
caatctagtaagcgttcaaaagaaagtggaaatccaaatggaaattataatcttcaggggtcctatgagcccagctctgagggtctggccggaaattttaacaaacccaaggagggcgaaacatcctattcgttaagaatgaaggatcatgaatccagccaagcaacacatgaccagatctccggatcaagtgacagtgaggaagtgggtgatgctcagactagagtggatgg

SEQ ID NO: 1335 - DNA, 388 bp, Nicotiana tabacum
tttccctgaggtaatacctctgctgctgctatgagcagatgtcacattcattaaaccgtgtttttagtcaataaatcgaactgatatatgtgatgcgtgtgtgtcgcttgtgcactcttagtctaatatacatatacataaatttacatatagagagagtgtcacgcgtaagagggaaataggctttaaagctcacttgcgcaaaaaataatgaagcattgtggataaatgctcaagcccctgcatgccaattgtttgtctactacttcttatgtccgataccaatcaatgtaagaatgttattatcaggccgcctccaatagaatccctgcaaaataactggtaggatgttgcacgatacaagaacgtagatcagcaatgcgtgagt

SEQ ID NO: 1336 - DNA, 435 bp, Nicotiana tabacum
ctaaaatggcgaaaaatgagagcttccaaggtgtgtcaacttgttatgttttcaaaagccgattgcaagaatatgcccagaaagttggatttcctacccctgtttatgagattatcaaagatggcccttctcataagcctacatttaggtcaacagtgattgtgaataatgtcagatatgattctctacctggatttttaaatcgcaagacagcggagcagtcagctgctgaagttgcactcaagcaacttgtagattctggggcagtggcattgtgcctttctcagccagtgcatcagacaggcttgtgcaaaaatatgttgcaagactatgctcagaagatgaattttgcaattccacaatatgaaatgcagtggcatgaaacaaaaggcaaaatcacatgttcattttcctgtactgttgagatagggggaa

SEQ ID NO: 1337 - DNA, 263 bp, Nicotiana tabacum
atggcaacaagtattgtttttgagcacgcgaatgatggttctggcattggcgctgcacttcttgcggcctctaactccctatatgttgaagacaagtcttgagagcgattagatgatatttagctagaggaaactccctttaccttttatatagtgcttttctctagcctttttcttttgatttctctcctttttggttcttctaccaattatattcagaattttccagcacttgtacttggtttatagtttaggatattata

SEQ ID NO: 1338 - DNA, 502 bp, Nicotiana tabacum
gagctactgaattaattccgtatatttagaagagtgaaaaagataaggagaaaaaaaagatggagaccttcccagtgattgacatggagatgcttaacactaaacaaagagctgcgacaatggagaaaataaaggatgcctgtgaaaattggggcttccttgagctggtgaatcatgggatatctcatgagcttatggacactgtggagaagctaacaaaggaacattacaagaagtgtatggaacaaagattcaaagaaatggtggcaaacaaaggacttgaggctgttcaggctgagactgatgatttggattgggaaagtactttcttcttgaaacatcttcctgtttcaaacatctcagatgttcctgatcttgttgatgattacaggaaggtgatgaaagaattcgcacaaaaactagagaaactagcagaggatcttttggacttgctatgtgagaaccttggccttgaacaaggttatctaaagaacgcttttta

SEQ ID NO: 1339 - DNA, 529 bp, Nicotiana tabacum
attttgcccaaatttcttttctttgcatctaaggttcgatttcattatggaagaagcaaatgttgttgaagcgaaggatggaactatctcagtagcctctgcatttgctggtcatcaagaagctgtacaggatagagaccacaaattcttgacacaagcagtcgaagaagcttacaaaggtgtagaatgtggacacggaggcccatttggtgcagttgttgttcgcaatgatgaagtagttgttagctgccacaacatggttttgaagtatactgaccctacagctcatgcagaagttacggcagtaagagaggcatgtagaaagctcaatcgatttgagctctcagattgtgagatatatgcttcttgtgaaccctgtccgatgtgctttggcgctatccatctatcacgtatcaagaggttggtatatggggccaaagctgaagctgcaattgctattgggttcgacgatttcatgcggatgctcttagagtactggattttatcagaaggctcaataagagatcca

SEQ ID NO: 1340 - DNA, 530 bp, Nicotiana tabacum
gaatgacccacattgtgagagatgtagaaaaacctggatcaaaactccacaagaaagaaacatgtgaagcggtcactataattgaaacacccccaatggtgatagttggtgttgttggatatgttacgacacctcgtggcctgcgttgcctcaacactgtttgggctcagcatctcagtgaagagttaaagaggaggttctacaagaattggtgcaagtccaagaagaaggcctttttgaagtactcgaagaaatacgagaccgatgaaggtaaaaaagatatccaggcgcagttggagaaactgaagaagtattcttcagtcattcgtgtgttggctcacactcagataaggaagatgaaaagtctgaaacagaagaaagcacatctgatggaaatccaggtgaatggtgggactattgcccaaaaggttgactatgcatatggtttctttgagaagcaggtgccagttgatgctattttccaaaaaggatgagatgaattgaacatcattggggtgtttacccaaagg

SEQ ID NO: 1341 - DNA, 367 bp, Nicotiana tabacum
aagaatccaaaactatttgaatgttgctttacatccctctctagagtgacaacatcaaaaaaattgtagctaacataaattttggattacgcagaagaagggtcagctgcttcagatgcagcggcagctcttttcttggcaaaatattcctcagctctagcaaggtttttggcaactgatggttttacccacttctttctgcccggtagaacggttaatgaacaaccagcagcctctagtttttcctttgctgatgttgaaaaggcgcgcgccttaaagttgagcttcacgcttagttcaccatcgcctaagatctttagcggaagtctcctttctctccctgatggatttattagacccttctgct

SEQ ID NO: 1342 - DNA, 386 bp, Nicotiana tabacum
acttgcatgtagttccgccagcaatgtacaatgagaatcccctctttttccctccgggttacggctttgatgctcagatggcatttggacagtcctcccccatcgctagtcctctttctccttttatgatagatggccagctatactccccacaccagattccggtttctccaaattactatgcaccacctatttcccctggcttgccgcatgttacatcagctcttccagcttcgcagcctgatctggtggcaccaggaagcactggccatgaaattgatagcatgtattttgggccaggatcaggttactacatacccgttggatcgtttggcggaggcgagctttcgggaagcagcaacattggtttctacaattaccaaggt

SEQ ID NO: 1343 - DNA, 547 bp, Nicotiana tabacum
ctcctctgggaaatggaaagcttgatgctgcttatcgtgaagcaaaagagaggaatgctgattgtcctgtttttctctttttctcggtgaatgctagtggacaattttgtggggttgctgagatggttgggcctgttgattttgagaacaatgcggagcactggcagcaggatcgatggagtgggcaatttcctgttaaatggcatgtcattaaggacgtgcctaacagtcagttccgccacctacttctggaacataatgacaacaaaccagttactcacagtcgagattctcaagaggtgagattgtcagagggactaggaatgttgaaaattttcaaaaactatgaagcggatacctctatattggatgatttcacctattacgatgagagggagaagtccttgctggaaaagaagagtaaacagcgaacacttcaacctggtagtgctgcagttactactgcagctgacacaataagtcaactagcggatagtctgccggcacattaaacttggaaggcaacaagaattgccctaaaaagagt

SEQ ID NO: 1344 - DNA, 317 bp, Nicotiana tabacum
attatgctgacatggaggtgaggaagtacgacaagcaaaataaagcatgggttaccataggaagattgcctgaaagagcaggttctatgaatggttggggtttggcatttagagcttgtggtgataggctaattgtaattggagggcctagagccatgggtgaagggattatcgaagttaattcgtgggttccaagtgaaggaccgcctcagtggaacttgcttgggcgaaagcgatctggtagttttgtgtataattgtgctgtcatgggttgctgagatacggagtttgccgtccatgcaggtagcagtgttttt

SEQ ID NO: 1345 - DNA, 474 bp, Nicotiana tabacum
ggaattattcccaaggcaatccttatcctagtgcaaactatggtactgggtctagttctctgtgggaaccaggtcacagaaattggctaactcctgacagaggtggaagacgtgagatgggatcggcactctgttaacatttctactgaatcacttggtatggcaagtgaacgaaaccgaggaccaagggcattaaaaccaaagagcaagggtcccattgaggatagctcttcatctgtcatccgtaaagaagttgagtcgactaatactttgcagcctgagcagtataatcggcctgaatttgtcactggttatgaacatgccaagttctttgtcatcaaatccttcagtgaagataatgttcacaaaagcatcaaatatagtgtgtgggctagcactcctctgggaaatggaaagcttgatgctgcttatcgtgaagcaaaagagaggaatgctgattgtcctgtttttctc

SEQ ID NO: 1346 - DNA, 535 bp, Nicotiana tabacum
cagggagggtatcccgccagacccagcagcgtttgatctttgctggtaaacaactggaggacggcaggactcttgcggactataacatccagaaggagtcgactctccatttggtcttgcgtttgaggggagggatgcagatctttgtgaagacattgactgggaagacaatcaccttggaagtggagagctcagataccattgacaatgtgaaggcaaagatacaggataaggaaggcattccaccagatcagcagaggcttatctttgctggtaagcagcttgaggatggtcgcacgcttgcagactacaatatccagcaagagtctactcttcatctcgtgctcaggctccgtggtggagacttctgaattcatgtgcgctaatgctgcttttatgatggctgtgtcaatgttgcttctttgttttgtttcagaactttaggtttcctccgttttccgttaaaagacatctcagattctgttatgttgttttcgctgctaataaagattgggcgctacttggctttataaaa

SEQ ID NO: 1347 - DNA, 475 bp, Nicotiana tabacum
ccaaaccttattgacttggacttgtcaagtaacctgctatcaggtgaaattccacctgagataggtaacctgaagctaacctcactcaacctttcttccaatcgcctaactggtagaataccggttgagttagagaatgcagcttttgatcggagcttcttaagtaaccctggtctttgtgcaagtgatccatcagtaggacttggcttttgcaaggggaaaacggggaagtccgataagctcccggtcaaacttcttgctgctctagcaagtgtaggtggagtaacagttctggtggctgctctatatagtttgttcgtgttgagaagctataggaaacgaaagcaagaattggttttgacatggaagctcacctcatttcacaagttagacttcacagaggcagatattgtaccaaatcttactgagaagaacacaatcgggagtggaggatcaggacaagtctacctcgtgc

SEQ ID NO: 1348 - DNA, 524 bp, Nicotiana tabacum
atgaaggaaatactggtataatagttgttgcggcaaccaatcgtgcagatattcttgactctgctttgctgagaccagggcgatttgatagacaagtaagtgtggatgttccagatatcaagggaagaacagagatcttaaaggttcacgcgggcaacaagaagttcgattctgatgtttctcttgaagttatagccatgaggacacccggttttagtggtgcagatcttgctaacctcttaaatgaagcagccattcttgctggtcggcgtggtaagacagcaatcgcatccaaagagattgatgattcaattgataggatagtggctggaatggaaggaacagtcatgactgatggcaagagcaagagtctggtggcataccacgaagttggacatgccatctgtggaactctcactccagggcatgatgctgttcaaaaggtcacattaatcccacgtggtcaggcaaaaggtttgacctggttcattcctgcagatgatccaaccttaatatccaagcag

SEQ ID NO: 1349 - DNA, 266 bp, Nicotiana tabacum
cagaattccccatccatcattagaagtcatcggcggagctcgagagaaatttctccctgcgtttacatcacttgataatctctacaattcttatcctatcgtcgcttcgaatcggcatatagagactatttttgcagctttttttaggtccgttcctgacgttcgtctccggcgagagtgtcttcggactaaggatgatggctccgtcgctctcgattgggtctccggcgacgatcgccgtttacctgccgattctccgctgctcc

SEQ ID NO: 1350 - DNA, 451 bp, Nicotiana tabacum
tagaagctctactttgagaagaaaagaagtgaaaaatggccagcataggaacgggatatgacctatcggtgacgacattctcgccggacggcagagtatttcagatcgaatacgccggcaaagcagtcgataacagcggcactgtcgtcggcatcaaatgcaaggatggaatcatcttgggagtggagaagctaatagcatccaagatgatgttgcctggatcaaatcggagaattcactccgttcatcgccattccggcatggctgttgcaggtttggctgcagatgggaggcaaattgttgcccgggctaagtctgaagcaaccaacttcgaaagtgcatatggtgagccaattccggtgaaagaacttgcggaacgcgttgctagttatgtgcatttatgcacactgtattggtggctcaggcctttcggatgtggggtgattcttgg

SEQ ID NO: 1351 - DNA, 501 bp, Nicotiana tabacum
ttttcacttcattcctatgtaattgctgtgtgtttgtgttaattcttcaaaccaaaagtaaaaaatcaattactagtagaaagtgaagatatgaggatggtaagggctattgattcttcagagtgtccaaatatttgtgggtttttagttgttgaagcttatcctaaaaggtattcatctaagatcccttctgatttagtccttttcttgggccttggctttattgattggtaatacattctccttttttctagtcccatatcaattttcttgatttttacataatcaaaaatacatatagttccgttattagatgcaaaaagatacagtttttctgtaggttttgggggaaataaagactatggggtttccaagatttcatttttatagcttttctttggagttttatagctgttgctgaatattttgactattttcctatttggggtttgtagttatgtgatgaaataagttaaagggatttagtggtggtgtgaatgt

SEQ ID NO: 1352 - DNA, 365 bp, Nicotiana tabacum
gtgtcttcatcacacgtgctctctcattcaatatcctttgctcctcacatttttgcttcttaattcaccctcgaagattccgattcagattccggtcaattctcgccggtaaatccctcagacaccggcgaatttcatcttccctcgatcgcaatgaatcccgagtatgactacctctttaagcttttgctcattggtgattctggcgttgggaaatcatgtcttcttctgaggtttgccgacgacacatatctggaaagttacataagcaccattggagttgattttaaaatccggacagtagagcaagatgggaagactataaaacttcagatttgggatacagatggtcaagaacataaaga

SEQ ID NO: 1353 - DNA, 331 bp, Nicotiana tabacum
aagaagcgacctctaccagccgcagcaggagaaggggatgtaccagcagcatcgccagcagccatggtgaagtattcgatgggaacccgacaaccctaccaagtcctgcaaagctaggggcgctagtctcagatgttcactttaagatacacacgatgatgacagcccatgcacttaggaaaatgcctttggacaaggccaagagatatctggaagatgttcttgcacacaaacaagccattcctttcacacgcttttgtggtggggttggtcgtactgctcaggtaaagcatcgccattcaaatggtcaagaacataaagaccatcaatc

SEQ ID NO: 1354 - DNA, 304 bp, Nicotiana tabacum
tttatgttcttgaccaattcttttagaattttattctcgctattgtatgcggctgcttttttgaggaagacatcgagttccttgagatcttcaagtagattctcagccgcatccttaatcccaataatcagttcctcgttgtcccgtagcaactgcatcaagttctctatcagaaaactcaaacctaaatccgccatgttttttccttcttatccaatactgtatttgacctaattcagttcagctttagcaattagcatagagagagaaagagactttgaggtttcggggaagatgtgcaaat

SEQ ID NO: 1355 - DNA, 276 bp, Nicotiana tabacum
accaagtatttgttgcagcaaatacgtgctgcttctaatgcttcagaggacagctgctcgtgttcaaaagagaccaagtgaacgcatagagggaactcatcaacaaaagccttcttcttccctaaatcgaagatcctgatctttgggtctggtacaccacggcagaaacgggatttcgggtatggcttgttcttacagtaacgataacatcttgctggtcgtcgacccatggtggcactttagaacaaccttccttcaagtgcttgctaacgtttc

SEQ ID NO: 1356 - DNA, 300 bp, Nicotiana tabacum
gttcttgaccagcggtgtcccaaatttgaagttttatggtttttccatcctgttccactgtgcggattttgaagtccacgccaatggtgctaatgtaactttcaagatatgaatcatcagcaaatctaagaaggagacatgatttgccaacaccatagtctccaataagcaaaagcttgaaaagataatcgtattctggattcatgactgctaaaacgtatgagatcggtcaaaatatggaagcggtgaattcaacaagtatttgggatttttccggcaggaaagagaagatgaaaatag

SEQ ID NO: 1357 - DNA, 295 bp, Nicotiana tabacum
accatctttcacagctgggtgacacgtgccaagtctccccttgtcgtgaaccaatgccagcaaaaaatttctcttcccatttgtctccccattttgttccaagctcagtttccgcccacttgtctgtccatttaagaacagaccctctcccgtcataatgctccccccatttctcccaccaagactgttcatttaatctgccatacttgtgggcccctttctctgtccaacccttagcatcatatttttcccaccaattctcataccacccagcattctctgtgcctgattttgc

SEQ ID NO: 1358 - DNA, 407 bp, Nicotiana tabacum
caaaggagggactcctttggttactcactctgatttctgaaattaaaaaacctaatttgcgattgatctcatccaaaagatgctattaagaagctcatcaagtcctttactgaattcatgggtaccaatctcgtgcgggtcgtcgccggaatcagacaagatgctaccaatacagacgccgcaattgattaggactggatctcattcgatgtctacgtcgtttggtcatgatgaatctccgaccaaacattcatccagccggtgcatgcgcgagtcggacctccgagatccagctgtacttcccaagaagaacaaaaacgggccaaagaagccgaagccggcgaagctaaaagagagagaagtgggtccgacagaggtgacgagattgttgtcgaattccggtttgg

SEQ ID NO: 1359 - DNA, 366 bp, Nicotiana tabacum
aatgcaacattcttcccacatgaacagtgactttgggagtggaatgcaacaatcctcttactctcatattcctaggggattgggaccaacagaacacgcttctccaaaatactatggacaggattccgatagggcccctggttactatgagcagcacaacaagaatactgatatgtggaatttgaagagtttggatgattaaattcccaacacttttatataaggtgaatctgtgtgctttggttgaggctttggctatatcacaaaggcctgtaacctaaataacaaatataaacaaccctgctgctatctagttatccatgtatttgcttttttataactaaactaagaataatttgaattaaa

SEQ ID NO: 1360 - DNA, 468 bp, Nicotiana tabacum
ggacttgcagtgacgagtctccagcaggcatagccttatattcaggggattggttccagttctccatgcaggatctgccagggcttcccatgaagagtctacagaagaagctctggactttgctcttcaacatgccaaaacaaaagggctatgcaagcaaggagactccgttgtagccctacaccgtgttggaactgcgtctgtgatcaagattgttacagtcaagtgatggatgacttttgacgcgtgcctttttgggtttctgttgttgcaaaagggtaactgataaatgtttttgcttgttgcactgaatcattttctgccttctagagaaggaatttatgactatacattatattttgtctttatataacgcctcgcccccttttttgctttccagcacaattttccaacctgacgggacagtgatatgatgtgaaataaattccctatggcttgaatttaaaa

SEQ ID NO: 1361 - DNA, 391 bp, Nicotiana tabacum
cttcagggcaatcaaaatttagcggaggtgcatttaatatcacatctgggagtgtgccttcagcaacaaattccagactgtcaccccttcctccagaaccagctgatttctatgaccgcaatgcatcaattgatattcctcttgatagttctgcggacttgaaaaagaaagaaaaagaattacaggcaaaggagagtgaattacggcggagggaacaggaactaaaaaaaagagaagatgctgcagcaagagctggcattgttatcgagaagaaaaattggcctccgttcttcccaattatccatcatgatattggaaatgaaataccaattcatctgcaaaagctacaatatgttgcatttacaacattcttgggacttattgcatgcct

SEQ ID NO: 1362 - DNA, 470 bp, Nicotiana tabacum
gtaaagtgttcctttcacagaggtgcactcgattcccatctttttcatgaactaattgcaccttttatttaattctgatcctcaaattggtcccattggaccatggatgtaataggaccaattgcaagaatggggtccaatgtatttgttctttccatttattttttttacgttaagggcgaattccagcacactggcggccgttactagtggatccgagctcggtaccaagcttgatgcatagcttgagtattctatagtgtcacctaaatagcttggcgtaatcatggtcatagctgtttcctgtgtgaaattgttatccgctcacaattccacacaacatacgagccggaagcataaagtgtaaagcctggggtgcctaatgagtgagctaactcacattaattgcgttgcgctcactgcccgctttccagtcgggaaacctgtcgtgccagctgcattaatgaatc

SEQ ID NO: 1363 - DNA, 518 bp, Nicotiana tabacum
ctcttgcagccaccaaccgtaactttcgccaggcagctcgcattcttggattggactccaaacttgagaagagtcttttaatccctttcagagaaattaaggtggaatgcacaattcccaaggatgatggaacattagtgtcctatgttggattcagagtgcaacatgataatgctcggggtcctatgaaagggggaatcagataccatcctgaggttgaccttgacgaagtaaatgcccttgctcaactaatgacttggaagactgctgtagcagatattccatatggaggagctaagggtggaattggccgcaaaccaaaagatctaagcaagagtgagttggagcgccttacacgtgttttcacgcagaaaattcatgatcttattggaattaatacggatgtccctgcacctgatatgggcactaatgcccagactatggcctggattttggatgagtattcaaagtctcatggtcactcacctgcaattgtgactggaaaaaccgattgatct

SEQ ID NO: 1364 - DNA, 350 bp, Nicotiana tabacum
ttctgatcatgttttgcgcttcaacaatatcccacagatcaaaatgattgtggtacttggggaacttggtggacgagatgaatactccttagttgaagccctgaagcagggaaaaatcaacaagcctgttgttgcatgggttagtggaacttgtgctagactcttcaagtcggaagtacagtttggacatgcgggtgcgaagagcggtggtgaaatggagtctgcacaagcaaagaatcaagcactcaaagatgctggagccatggtccccacctcatatgaagcttttgaaggagcaatcaaagaagcatttgaacagctggtctcggatggcaaaacaactcctgtaa

SEQ ID NO: 1365 - DNA, 291 bp, Nicotiana tabacum
gcggtttaaggcctgatatgtctgaagatgagcgactcgctcttacccagaagtatgaagagttgcttgttgctggtggtggcatgtatgtggaggtgttcaaccgaggggttattcccctagcctacagcatcaggaggaaaaataaagctggagagaccaatacttacttggacgggatctacttgctatttacttactttaccaaacccgaatccatgacagctcttgaggcaacacttaatactgatgatgatgttatccgatcgtccagcttcaaaataaggaaaa

SEQ ID NO: 1366 - DNA, 436 bp, Nicotiana tabacum
agagcataggaaatggcaagcacagtaatgagcctcaaacctgcacctttcagtgtggagaagacagcagtgaaaggactgccatcacttgctaggtcttcttcttccttcagagttcaagccagtggtgtcaagaagcttaagactgacaagccttacggaattaatggaagcatgagcttgagagacggcgttgatgcctcaggcaggaagcaaaagggaaagggtgtttaccaattcgttgacaaatatggagcaaatgttgatggatacagccccatctacaacacagatgactggtctccaagtggtgatgtctatgttggaggtaccgctggcttagccatatgggcagtcaccttagttggcattctagctggaggtgctctccttgttttcaacacaagtgctttggcacagtagatcgttatccttg

SEQ ID NO: 1367 - DNA, 493 bp, Nicotiana tabacum
gaaaccttgtaataccagggatgattgctctagtggttggctgtgtagtgaatgttataattttagtaagacctgtgggccacttgttggtgatgctattatgggcatgtgatttcggtattacttctccttccgaccttccagagcaccggacaagtggcagactttatacatagtgaaacctcgtattaacaaagtaacatagtcctgtgtttgtaataaataaatagtcgctagcaatccagtgctcttcttgtaattgttgttgttgtgtgtcttttgtctttgaaattgtctatactcttgttttcaacttttagtcacttatatgataaataacaagtgacgaaagtgtcgttcaagaaaaaagtatgatgggctgatcaaaaactctgcaggttaaggggaaaaaaatctgccgctgttgatctgataaaatacagcatgtgtgtaatgtgttcatcaattaaataaaagaatcatagaatgtaaa

SEQ ID NO: 1368 - DNA, 413 bp, Nicotiana tabacum
gttcaggaaaagctgttgtgggttggctgaaaattaaggctgcaatgagatggggattctttgtgcggaagaaggcagctgagaggcgggcacagattgtggaactggatgatgaataaaatatagcgcttcgaggcttaaccaccgaccatttgaagaactattcactaggccgtggtgatgcaggtccgagtaattagctacacaggagtttatttccgagggattagtgaattcgttttcattctctttgcgtcaaatagtttttcatgtacagaagcctgtacagtaagttcacttttaatgctctcattgttaactcaatttgtgctctctttatctgtttcaagatgtaatgtattagtctgcagacccgaagggaaatatactttcaaagaactcgtgacccaaaa

SEQ ID NO: 1369 - DNA, 402 bp, Nicotiana tabacum
gaattcgcccttggccagaataaggaaagacccctagactacttaactaaattacagaaccaacaaagagacatcccgtctacctaatacaagaatcaaattcagcgacactcggacacacaatgaccattgacgggatctagagaagattgagatgtcacataaactcgaatctacccagcccgggtcattttcatttttggcattgccttcttcatctgccgagcacgctctttagcctctttcttgcgaagagcctctgcactaagcttagcctcagcttcctctatcttctttctctgctcagccttcttcctctgcagcgcttcctgcctggcattctgtagttctttgtaaatctcttgagcaatcttcgttcttgctccatcagtttttgtgcgg

SEQ ID NO: 1370 - DNA, 251 bp, Nicotiana tabacum
ttataacatacttctgagtgttaaatttttaatattacttctcttttagaattttaaaaaatatgtactttttgatttaaaacttatcttttaagtcatttaggtctatatttttacaaatttatttaaaagtttggacgttatagctcttttaattaaattaacttatttaacaactagatataaaaaaatcgtattcttataaaatctatgtttagttttattttaacttttttacgttaataaatact

SEQ ID NO: 1371 - DNA, 181 bp, Nicotiana tabacum
ctttcccctgtcttcttcccttccaaacacttctcaatattccctgaaaacaatctcacctttttttgcccacttcacttgtctttgtattatacacatacttcttcttttctctctgctacaatggcagtagcagagtttattccttcttcttcatttacaaaaaagaccaatgtttact

SEQ ID NO: 1372 - DNA, 214 bp, Nicotiana tabacum
gctgcttcctcaaatcgtcgaaaatgccgttcaagaggttcgtagagatcggaagagtcgcccttgtcaactacggggaggactatgggaagctcgttgttatcgtcgatgtcattgaccaaaatagggcgcttgttgatgctcctgacatggtgaggagccagattaattttaagaggctttcactcacagatatcaaaattgacatcaaaag

SEQ ID NO: 1373 - DNA, 391 bp, Nicotiana tabacum
ctcctttctctcaacgagttcaagccccatcttcttttttcaaatctcccagattcttctcttttcccattgctctgattctttgggaagttggttggaggggtaatttgagctcgagaattggatttggtcatcaatttcattgtataagaattttgtttgtcttttacctctgaatggatgccaagaagttcatgcaattggtcgaggagaaaaagaagagagctcttgagaagaatgaagcccgcttgaaatgggagcaaaaacttgaagctgcagcaagagcaatatctgatgctgaagctagagagaaagccaaggcagctaagcataaaaggaaatcggacttggagtctgatagtgccagtgacactgatagtggatatgaccg

SEQ ID NO: 1374 - DNA, 247 bp, Nicotiana tabacum
caataacaaaaaatgggttccatcgcaaaggatccacgagaggacgttattcaagcatggtacatggatgacagcgatgaggaccagaggcttcctcatcaccgtgagccaaaggaatttgtgtctcttgacaaacttgctgagcttggagtgctcagctggagacttgatgctgacaattatgagacagacgaggagttgaagaaaattcgggaggctcgcggctattcttacatggatttctgtt

SEQ ID NO: 1375 - DNA, 284 bp, Nicotiana tabacum
attttcctgcttacctggatttaaaggtgggaatgctgattatgctatggatcctcaccagaaagagcaactccatgataatactctttcgatgatgcagcaacaacacttctcaatgggaagatctgctggttttaacttggggggaacatactcatcgaatcgtccactgcagcagctgcaacatgctccatctgttagtagtagtggtgtctccttttcaaatataaataaccaggatctgctgagtttacatggttcagatgccttccaatcatcgcgct

SEQ ID NO: 1376 - DNA, 419 bp, Nicotiana tabacum
  misc_feature (300)..(300): n = a, t, c, or g
cttaaccccaaggcaaaccgagagaaaatgacccagatcatgtttgagaccttcaatgtgcctgccatgtatgttgcaatccaagccgttctttctctgtatgctagtggtcgtactactggtattgtgcttgattctggtgatggtgtgagccacactgtccccatctatgagggatatgcacttccccatgccatcttgcggttagatcttgccggtcgtgatcttactgattatctcatgaagattctcactgagagaggctatatgtttaccacatctgctgaacgggaaatcgtncgtgatgtgaaggagaagcttgcctatgtcgcattggatttggaacaggagcttgagacagcaaagagtagctccatcagttgagaaagagctatgagcttcctgattggacaagttat

SEQ ID NO: 1377 - DNA, 411 bp, Nicotiana tabacum
ttcaaacgtaacaaagtctatccatccagcttttcatgttggtactgttgcacgcactaaaatggcctctagtaatttgtcagtcagctgagcgtcttctactctctacaggggtcataggacattttccatttatgcggttgacagcaggtgcaataacacgatatttttgtttgaacttcttcctccatcccttctcacgtaccacatccatttgtgacttttcaaccctcgtgccgaattcctgcagcccgggggatccactagttctagagcggccgccaccgcggtggagctccagcttttgttccctttagtgagggttaattaagggcgaattccagcacactggcggccgttactagtggatccgagctcggtaccaagcttgatgcatagcttgagtattct

SEQ ID NO: 1378 - DNA, 71 bp, Nicotiana tabacum
aagtatagttgtctggattggagggtcaatttctagcttctctcagtaccttccaacaaatgtggatttcc

SEQ ID NO: 1379 - DNA, 154 bp, Nicotiana tabacum
gtttgccccggctttttatttcaccattatgttgtttcagtcgacgagagatattggtggtgacaccaacataggtcttgataggtgaatttgtggagagaataaggtatacacaccataaagacttgatttttttgaattttcttgaattatt

SEQ ID NO: 1380 - DNA, 313 bp, Nicotiana tabacum
ccctttcgcaagttttagatccttcattgttgtaagttgtaatcggcggcgagtaattttgttgaagggaatggagggaggtgcagcagcagagaaacagaacgaagctacagcgtcttatacttattgggtgagggaggcgacccccacgatgctgcacctttggcctcttcctaggaagctcacttctcaggacctcaacaatcaagccaattatccccaaacccaccttgggtctgcctggaatcgggctggaacatgggaggagaaaagtctaaataaatgggctaatgataagaattaaggagctgct

SEQ ID NO: 1381 - DNA, 390 bp, Nicotiana tabacum
gaattcggcacgaggctcagctacgctgcttgctgcactctgtctctctctctctccctctctcttggaaaatttgcaacaaagaaaaatgacgacggtggtccctacttcagaggaagatcccgtgctctccgtcgtccggtttacggcggagatgtcatggtctgacgccggcgccgatattgcagagcctcaagttaatagattgtgtgtcgaggcccaggaatgcattattgaaggaaggtggttggatttggcttcgttgatgctcacttccgcagatttaatattttctaaagcttctgaaaaagatcttgagtgcattttcactatcatttgcaaccttgtcaagaagcctgagagcttggaccaagtacatgagatggcaga

SEQ ID NO: 1382 - DNA, 498 bp, Nicotiana tabacum
atgtccccgcgaacttagggttcccggaggatgtaataacccttgtactacattcggaggacaacaatattgttgcacacaaggaccttgtggtcctacatttttctcaaaatttttcaaacaaagatgccctgatgcctatagctacccacaagatgatcctactagcacttttacttgccctggtggtagtacaaattatagggttatcttttgtcctaatggtcaagctcacccaaattttcccttggaaatgcctggaagtgatgaagtggctaagtagagtggctatttctgtaataagatcaccttttggtcaaattattctatcgacacgttagtgtaagacaatctatttgactcgtttttatagttacgtactttgtttgaagtgatcaagtcatgatctttgctgtaataaacctaagacctgaataagagtcacatatgtatttttgtcttgatgttatatagatcaataatgcatttggattaaaa

SEQ ID NO: 1383 - DNA, 228 bp, Nicotiana tabacum
gttaagccaagtcaacaacctcaaccgttcataatctacttaccccatttcattttttcctccaaatttcacctgaaaaaaaaaaatggtggagctaaagaacctccgatcaaacacattaacacttgtacttgtaaatcttgctagtataatggagaaagctgatgaatctttattacctggagtttacaacgaagttggcaaagatttacatactgacccaactgg

SEQ ID NO: 1384 - DNA, 272 bp, Nicotiana tabacum
ctctgctgcgctgcttgctgcactctctctctcttggaaaatttgcaacaaagaaaaatgacgacggtggtccctacttcagaggaagatcccgtgctctccgtcgtccggtttacggcggagatgtcatggtctgacgccggcgccgatattgcagagcctcaagttaatagattgtgtgtcgaggcccaggaatgcattattgaaggaaggtggttggatttggcttcgttgatgctcacttccgcagatttaatattttctaaagcttc

SEQ ID NO: 1385 - DNA, 386 bp, Nicotiana tabacum
gttgtgtgaacaatgcataagaaagtgggacatcagcagtgttgtaaatgtgaccaaaataaggatagacattggctaagagtggaaggttatttcgtgctagaaattggattatgggattaatgaaactattgaattctcctcgaaaaatactatctttaggtgggtaggtgtttgctaagagccctgaatatgttgcagttgaaaccttgatttgatcttgcaaccctgctgctgctaatgcattgtacacattttgcatggcaggaccaacaaatggtgcatattgaccattatttgtaggagatacttcatttccaacagctatatatttaaatttaacatctggaaaatgatttattatgttatcttggacccatccattg

SEQ ID NO: 1386 - DNA, 240 bp, Nicotiana tabacum
gatggctcgagacagccatccgatcttgaattgcagcaggcgtttcaccagggtaaatacattgccggtattgccaagaaactcaaaggtgcagcctaatttctctcctgcaaagataatctttgcattcacacatttcttctcaaatcctaaaaaaaagaactacaaaatttatatctgtgattgtcgaagtctattttcctttattgggtatgaaatccgatctgtatgtgtctgatt

SEQ ID NO: 1387 - DNA, 412 bp, Nicotiana tabacum
tactgcaaaggccaagcccaagatcaagaggggtacaaggaactgtagaattttgataatgaattctggagtcttgtctggattgtatggggcttgttgcggtggaacataagaacgttttagtggaactgttgacacatcgatatccccaatgtaatacttatccatcatctctctagcagaatcactgtggccaacatcttcaaagtcattggttgcatctttcccagttgctgaaagcaaaacttcatcaccaccaggatgatcatccataaatggagttacatcatacacctttccgctgataataagccagcaatctttggtcttgttgtgtttggcaacctcctcaaatccatgaactttcccatctgacgccatcttttcctgctacgagagacagagtttcttc

SEQ ID NO: 1388 - DNA, 235 bp, Nicotiana tabacum
tggttaagttgaataaagacaattagtggagcggctactctggagggtgaaacaaattgaaaagatgcatagtcatctaaccttttctgaatgtcatgcaccaaatagtcagttttctttgtgattgtattgatatattcactctaggagatctttttatcaatgtcataatgccataatcttttcatttggtgtaacagtttcaggttataatgacagcatggttgctagaatg

SEQ ID NO: 1389 - DNA, 264 bp, Nicotiana tabacum
ttcttcccctctgctgcctattagcgctagtagagtaggattgacccgtaatacagaacctctaggcgtaacctttcgcttaatactagaatcgagaatcgaaacatagcatctgaggttgcattaatcgaggatacacgacagaaggaattgttctatttccaaacttcaccttcaaaaagcgtagattttttcaaaaattttctcggatcacgtgtttttctcctcgtaagactgagagaaatgactaaatatgagataaaa

SEQ ID NO: 1390 - DNA, 273 bp, Nicotiana tabacum
ctttttcccatgagaggtaatgagaagaattctagaatggattgctacctatgcctagatcacggataaatggaaattttattgataagaccttttcaattgtagccaatatcttattacgagtaattccgacaacttcaggagaaaaagaggcatttacctattacagagatggtgcgatttgattctttttttttatatttagtcatttctctcagtcttacgaggagaaaaacacgtgattcgagaaaatttttgaaaaaatctacgctt

SEQ ID NO: 1391 - DNA, 266 bp, Nicotiana tabacum
aaaaaaaccaaaaatccatatacagaatagagatattttttcaaataagaaaaaagatgagcggaatagcacaagattgggaacccgtcgtaattcggaagaaagcgcctaccgccgccgctcgcaaggacgagaaagccgtcaacgccgcccgtcgctccggcgcggagatcgaaactgtcaaaaaatctaatgcgggctcaaacaaggctgcctcaagtagtacatctttgaacaccaggaagcttgatgaagacactgagaat

SEQ ID NO: 1392 - DNA, 237 bp, Nicotiana tabacum
atcaatccaagtgcatggaggtggtttttcaatgtggtaggtgatgcaaggtgccccatatctgacacatggtggcaaacagaaaccggtggcttcatgattactcctttaccaggagcatggccgcagaaacctggttctgctacttttcctttctttggagtccagccagtaatagtggacgagaaaggtgttgagattgaaggtgagtgcagcgggtacctgtgtgtgaaaagt

SEQ ID NO: 1393 - DNA, 333 bp, Nicotiana tabacum
catcacgatcccacagaaaaacacagtgaggattgcacttaaatagaataattcagcaagcaggtatgacagataagccatgagtatcattatagcaacctcacgatcagtggagtgccttccaaagtagagttttttaattatataggcgctcagtagaccagcaacaacccctaagatggtgcttgaagcaaacaagtacagaaagtttccaactaattgcagagctttgcttgtgttgatatgagataagtcaaagttctggacagcattgaacagaaccacagatgtggcatcattcacaacaccttcccccaaacactagactgtaca

SEQ ID NO: 1394 - DNA, 384 bp, Nicotiana tabacum
ccagagtttcaaaatctaattttcactgcagtgatatcaacattacaaggaacatatcatgccctgtctcgccgattggtagccctcttttacatccaaggtcacctcaacacctaaatgggaggatgtctccttcacccatatcaagtcctatcaccatgtctggctcatcaacacctctctctggagggactggtgctatcccatttcatcaccttaatcagtcagtttacttacaggaggcagcaccacttccacagagtccttatatgaatgggccttcgtactgggatcctgatgttttacgagggacaccgtcaggatctcatgctttccgggaattggcatcctctcaaaatgatgctcttggaaagcagttcggga

SEQ ID NO: 1395 - DNA, 392 bp, Nicotiana tabacum
ctcaagtaaaacttggaaactctctttcctagtttccgctgaccactttagcttttcccatcatcaaaatgaatagccttagacgatctcaggtgtttaaattcgaaagtttggagaaatttctctcagagttcctctcttcagcagagtgctgtcgcagaacctttttcagtacccaaagcaactgaagatgaagccgtctctccaaaaatagaaaaaataattgcagaaatcactcaattaactttaatcgaagtatccgaattgagcggagccttgaaaaaacgcctcaacttgcctgacgcacctatgatggcaatgggtgccatgaatatggcagctgctaaggaagagccagaagaagtcgtggtacaagagaagcaaacgatttt

SEQ ID NO: 1396 - DNA, 548 bp, Nicotiana tabacum
gccttcctgtttttgctcacccagaaacgctggtgaaagtaaaagatgctgaagatcagttgggtgcacgagtgggttacatcgaactggatctcaacagcggtaagatccttgagagttttcgccccgaagaacgttttccaatgatgagcacttttaaagttctgctatgtggcgcggtattatcccgtattgacgccgggcaagagcaactcggtcgccgcatacactattctcagaatgacttggttgagtactcaccagtcacagaaaagcatcttacggatggcatgacagtaagagaattatgcagtgctgccataaccatgagtgataacactgcggccaacttacttctgacaacgatcggaggaccgaaggagctaaccgcttttttgcacaacatgggggatcatgtaactcgccttgatcgtggggaaccggagctgaatgaagccataccaaacgacgagcgtgacaccacgatgcctgtagcatggcaacaacgttgcgcaaactattaactggcgaactacttactctagctt

SEQ ID NO: 1397 - DNA, 460 bp, Nicotiana tabacum
gcggcattttgccttcctgtttttgctcacccagaaacgctggtgaaagtaaaagatgctgaagatcagttgggtgcacgagtgggttacatcgaactggattctcaacagcggtaagatccttgagagttttcgccccgaagaacgttttccaatgatgagcacttttaaagttctgctatgtggcgcggtattatcccgtattgacgccgggcaagagcaactcggtcgccgcatacactattctcagaatgacttggttgagtactcaccagtcacagaaaagcatcttacggatggcatgacagtaagagaattatgcagtgctgccataaccatgagtgataacactgcggccaacttacttctgacaacgatcggaggaccgaaggagctaaccgcttttttgcacaacatgggggatcatgtaactcgccttgatcgttgggacccggagctg

SEQ ID NO: 1398 - DNA, 401 bp, Nicotiana tabacum
aaaaaagagcttgaacttataattttatttttaatgttcctttggttgaaagttgttttgagctttgttgtagatattgttataccaaaataagtttggaagttcctgaaaaggcttttgtctaggggtgttcataaaaatccgaaaacctgaaccaaaccgaaaaccaaaccaaaccgaccaaaaaagcggatactttttgtttggtttggttttggttttgaaatttaaaaaccgatcaaatttggtttggttttggttttagttaaaaaaaccgaaccaaaccgaatataggagtagctattttaaatttattattacacctatatatatatgtatacttttgtacaaagttttaaattttttatagtaaataataatcgtttgcacttttagtaaaa

SEQ ID NO: 1399 - DNA, 433 bp, Nicotiana tabacum
aagtgttttgctcggagcataggtattccgatcggcatgactgtagttatgattacaaggcagctggtcgtgatgcgattgctagggaaaatccagtagtgaaagctgctaaaattctcaaagtttaaaaattggaaaatttgaagatttttcccgaaacatcttgaagcagtcaagatgggggtggtggttttgggtgttgaatgttgggggtgttgttgtaaatttaacaaaaggatgagggtattgttgtcattaagttattaaaataagttagtggagaacttttcttttttctttctttccttttttaagttttatatctgtttgttttaattttgtgttgtgttgtacatcctgcattgtgtcaggaaaattatttatccttacatactaaagttattattaacactcagtacttaaccaagtaaaa

SEQ ID NO: 1400 - DNA, 357 bp, Nicotiana tabacum
ttcggcacgaggacacaaattgccatcaatttcatcgcttgtgcaatcgtgttcaattccagagtgattcaggctgttgaatgaaaggagaacaagatctcgcagtggcagttagtttcccattgaagacggagaaccttatcagaaaaatttatgctatgcgcttcttggaggagtgagatgcatatgaataagtttatttttcttatattaagtgtgactataactctgcgtaagttagtatatttaatttcgattatttattcatgtcatgggattttttatgattggtatatgctgagacgatatagaccatataagtactgtatttttggaattgctagcacttgtactaaa

SEQ ID NO: 1401 - DNA, 203 bp, Nicotiana tabacum
ttattgtttgtcccaccaaactgtgggttattttcctttctgtttgctcagttacacaaccaagaaattcatttgctgcattgtctgattgaggccaaagaggcaattgtaaccaaccattataaagtgacgttcatgtttctgatacgctggttaaacttaccaaagtgccaggtacgacgtaatttttcccttggataaaa

SEQ ID NO: 1402 - DNA, 361 bp, Nicotiana tabacum
ctcgttaaagttcatcaactactttttgctcctaaagatataattccggtggaaggcctcaagcttgatgatgctgtcccaggagtttacacaattcactgcctacctctgaggctgaatcatggagatggttcacctgccaggtgcatcctcttccggtaatcatgtcaaggcagttaatacttttcacgggaaaacagaaaattgtcaaaatttcaaccagtttcgttaactaagaatgtccaagaaattgttatgagacttagatgtattatatgtactagcttcctttagctatatcatttacaaatagtattctgtataagctttgcatgagttcattttaaacatcataataaaa

SEQ ID NO: 1403 - DNA, 308 bp, Nicotiana tabacum
tttgaacaaagaaaacctgtcacatatgagcttatttatcgaaccaagaggctttcataagttttggtacaactgaagtagtgaaacataggagtatcaccagaactgacatcaaactaaaggcagcaggctactgtctacacaactaagcagattgtcactagaacctaagaaccatcatcgtcttcgaggttgttgactctttcacactcgtcaatccattcactatatatatcaataggctctgtcagtgccgtaacagtggtgctgaagctctcttgaacaaatcctgcatgttgcctccccaa

SEQ ID NO: 1404 - DNA, 458 bp, Nicotiana tabacum
agacattagcgatgatattgacttctgtttcaaactggcgaaagaaaaatctgttatactccttccaggactcgctgtgggtctcaaaaactggattagaataacctttgcagcggatccgtcttctcttgaggaagcactaggacggctcaaatcgttctgtcaaaggcattcatatcaagaaaatggtcattgttgattctacttagtaagcgatccttgtaatcgatcttcttctctgctgagcacctatagctacagttggattgcttagtcacagtcatagtgcaagttataacaatttattgatttatgaatatacttgtctatattaattttataggttgattacatggcaagttacaaacacattcaactgccaatcatgtacgtaataatgtgcaagaaaaacctgaattacacataccaaaaatgaaatatgtaattactattgaaaa

SEQ ID NO: 1405 - DNA, 277 bp, Nicotiana tabacum
aaagagctgtgtgggttaggagaaggtatttgcattctctaattaaccgataatcagatccaaactcttaaccctagaaaatcaaccatgtcttctaagcaaggtggaaaggcaaagcctttgaaggcaccaaagagtgaaaagaaggaatacgacgagaatgacaaggctttccttgcaaagaagaaggaagaggaaaaggcactaaaggagctcaaggcaaaggctgcgaaaggctccattggtggtgctggcctgaaaaagagcggaaagaaat

SEQ ID NO: 1406 - DNA, 286 bp, Nicotiana tabacum
aggtttgaagaaccgtgtcgaatctctgaaggagctctgaactcggtgtctcgatcccttcaacttgattcatagttgcatgatcaaaggtgaagcaaatgaacaagggtagatgaatgcggtgaagaccttactgaagagtattggttgattgcttatagactttaagatgttctagaatcttgtgttttaaattattttgcaatcttatgtattaactcttgaattgtctaacaatattatgtactttgcttttatatatgaataataataatagttgaataaa

SEQ ID NO: 1407 - DNA, 286 bp, Nicotiana tabacum
agaagaaagggatgaaggagaagattaaggagaaattgccaggaggtcacaaagacgatcagacccattcaactgcaacaactacgactacgggttatggtatggaaggggagcatcatcatgagaagaagggaattatggacaagattaaggagaagcttcctggccaccatggccctggccaccactagaaaatctgctgcgaaacaataaatacctttaaagatacatgtaaaatgttggtctaatacttttgtatttcaaggttgtttctagttggtcttgg

SEQ ID NO: 1408 - DNA, 341 bp, Nicotiana tabacum
cttccatttttgtctctctctctctctctctctacaaacctaatactacatcggagatacagatctaaaacatctccaaaaatctaaaaaaatggcattgggtggaggtggtccacagagaggtactgctgcagcctctgctgccaacctacggcgcaggaggacaactagtggtggagctgctggaggagccggtggtactatgcttcagttctacactgacgattccccaggactcaagatttctcctaatgttgtgcttgtgatgagcattggtttcatagcttttgttgcactcctccatgtcatgggtaagctgtacttgtccgcaaggaagggta

SEQ ID NO: 1409 - DNA, 221 bp, Nicotiana tabacum
ataagggctcgttccgcaaattttccttcccctaattttccccgttaattggtataggtaggaattgagtttcgggtaggttttattttgtagcatatgggtttcttatcccctaggaagaggttatccaatcattttgcaagtctctttgtagttgaattaatttttggggctttttacttgtgttaactctttaaaatgaattcagtttaggcgtaaaa

SEQ ID NO: 1410 - DNA, 350 bp, Nicotiana tabacum
ccaggaattcggcacgaggaaggcgtacggagagttgccagagaacactaggctcaatgaggttaacggattggatgaagaagatgatggtgatggtgatgactacattgagtttgaagacgaggacattgacaaaatctaaatttcctgatttaaatagtgctgtcactggggttcctgctgggcgctcaaatatttctgtggagtttgaatttaatacaaaaaagagagaactcttatatgtaccgtttgaagtaatatgattaagctttatgcattagtatttctgtatgaagatttattcatgctttgatgaaacagatgcaataacagctacctgttctctaaaa

SEQ ID NO: 1411 - DNA, 322 bp, Nicotiana tabacum
ggcggattaacgaggaacgtacatccattctaacaaggcataaaaattggtgcaatggagttagtcttaagttattttagtttttttttcttgggttgatgaaatctttaattttttttaatattatagtgtagttggttttggaagatatgttgtcaatattattaggtcggtttgattagatcaatatggcttaagccttaagggatataggtataagttggcatttcccccccttatttgagctttgtaaatcttaatttaccattttggttttactacttttgcaaacctttgaccatctattggtggttgtataaaa

SEQ ID NO: 1412 - DNA, 460 bp, Nicotiana tabacum
ttttgacatgctttttaacattcgaaatactataaaggaagatgcattagttgacatgctgatttccacaccaacatagtctaatacaaatatgcataaaccgaaacagataaggaaatgttttatgctgctgagtactgatggcatatgccatatattggcatgctctattgtctgcgtctaactagtattagcaactaataagtaagtccacaaacgaacaaacaggtctgaaatatcccctttcaaacttcagctgccataggaacgatggtcgagcagacgccaccgtttattccttcttacctatgccatgagacatattgtagatccctctcccaatcataaacaaagcagtagctgccaaagcagctggaatggccactgaggtgatcttgtcataacgacctttcaggtatgtgtgcttgtgaacactttggaaaaacttttgcttctcaac

SEQ ID NO: 1413 - DNA, 415 bp, Nicotiana tabacum
ttttgactaaactaagtaagggtatcaaatttcatatagtaaaatactgttgcaacagaagctaaagctaggctgagaaacctactaacaacgcaacaacgtttagtacgtggaaaacgaatatagatcatacagtttcataaaccacatcataagaaactaagttggtgcataatgaagcacccttcctaacaatcgcgattgcgtttctacttactttctttaggtcaacatgaggtcatttcccccaaggtgaggacggaggcaaacgcgaacttcatgttcttcaggcccttcacagagttttggcaccaacatctcgagcactgttcctgattcgtcgtaatatgcttcaattttagcatcttcaggaattcttgttgagagaggaatttctctgacaaactcccctgga

SEQ ID NO: 1414 - DNA, 285 bp, Nicotiana tabacum
gatctttgcatctacaatggtgaccactggaaagaaaacaaagaagacacatgaaagcataaacaacaggttagcacttgtaatgaagagcggcaagtattctcttggttacaagactgttctcaagaccctcaggagctctaaaggaaagttgatattgatatccaacaattgtcctccgttgaggaaatctgagattgagtactatgctatgctctctaaagttggtgttcaccatttcaatggaaacaatgttgatcttgggacagcatgtggcaagtattt

SEQ ID NO: 1415 - DNA, 420 bp, Nicotiana tabacum
acttaaaaccaaaagtacaacaccgaaattgcatacctttctaccaccataattgcatacaatcaaagatcacgacaactagtttaagaaattaaactagctagcacgtccatctttgaacaatcatagtgcttatttcaaattaagtgacttttacatacataattaagggataatattctcaattagcaaggcctggtacagaaacaacggcggcggaatccacggcagtcgccaccggaaaatccttcggtcagacaaacggtggcacagttgctatctcttgagcatggtcccttgaaacggtggctctgggactcacaagttcttgcctctgcaattgtcattggtcccatctcggtagccgtgacaagcaatgctataagtaacacagttgcaaagaagcgcatggagttgcca

SEQ ID NO: 1416 - DNA, 349 bp, Nicotiana tabacum
ttttgcaacgcaaattagatttaatcggatttgatatcaagtggctaaagaaaaatacagtacaataccatacagttgaaagactacaagacaagtggtactaatagaattatattaggctattcataactttccctttactctcaaaactaactcacaccagcacaagtacatagtctcaaggcctaactttagtcatgacatttaggacatttgctgcaaatctggtatttacatgagcaaattttacaagctttgccggcgactttgcctcctggttttgcaccttttcgtatccaacccggtatcttacggatgattccggcacccgtcttctgattagtaatgt

SEQ ID NO: 1417 - DNA, 209 bp, Nicotiana tabacum
gaaatagagaaagcagtggtagcgtatttgaagaagaagggtttcaagcaaactgagcttgcttttcaagaagaacagcaacttaataaaaacacaaattcccaggttgaccctgacgttaccaaaaaaatcctctctttctctgaatttgaaactggtcctgaacggtaccaagaagaatatagcaagcttcgatcatgggcttatag

SEQ ID NO: 1418 - DNA, 590 bp, Nicotiana tabacum
taatgaattacaccacttattcatcatacaaaagcgcgggtagataagaaaaacagtaataatacattctaaaatccctttaattattcaagaccagaaccacccaataggctctccttcttcatgttgctgctcctctgccgccacaaagacgttacagaagtagccatggccgccgccgtcatcactaccatcatcttcctccgactgcaaaccatccataggcggaggaatattattacatcctccagcccctagtggatactcttccatatgaccagtgtgaaaataggagtccccactgtccaccagctgtggactgtgcccatctaccaccgcacttccgccgctgccactgctcagcctgtcctccgccttcaccttcacttgaagggtcagcgcatctacctccaaaacctcacatttttcatttattacccctgcttcaccaaccactttcccctgcaacttctccatcaatgaaaccacctcagctttgagcttctcattatctttgcgaatggagtcaaaatcagagagaagagagtcataagaggatttgagctgatcataatccctttcgagcgtct

SEQ ID NO: 1419 - DNA, 375 bp, Nicotiana tabacum
gaaataccgtaaataatacattctaaaatccctttaattatttaagaccagaaccatccaataggctctccatcttcatgctgttgctcctctgccgccacaaagacattagagaagtagccatggccgccgccatcatcactaccatcatcctcctctgatggcaaaccatccataggtggaggaatattattgcatcctccagcccctattggatactcttcaatatgaccagtgtgaaaataggagtccccactgtccaccagctgtggactgtgctcatctaccaccgcgcttccgccgctgccactgctcagcctgtcctccgccttcaccttcacttgaagggtcatagcatcaacctccaaaacctca

SEQ ID NO: 1420 - DNA, 265 bp, Nicotiana tabacum
catcatacaagcgcagataattaagaaataccgtaaataatacattctaaaatccctttaattatttaagaccagaaccatccaataggctctccatcttcatgctgttgctcctctgccgccacaaagacattagagaagtagccatggccgccgccatcatcactaccatcatcctcctctgatggcaaaccatccataggtggaggaatattattgcatcctccagcccctattggatactcttcaatatgaccagtgtgaa

SEQ ID NO: 1421 - DNA, 418 bp, Nicotiana tabacum
acaatgcaatggcatattgcatggtgtgctccttatttatacataacgaaaaacgcctcggttattggtatgcggtaaaaccgcactcaggcggccttgatagtcatatcatcctgaatcaaatattcctgatgtatcgatatcggtaattcttattccttcgctaccatccattggaggccatccttccctgaccatttccatcattccagtcgaactcacacacaacaccatatgcatttaagtcgcttgaaattgctataagcagagcatgttgcgccagcatgattaatacagcatttaatacagagccgtgtttattgagtcggtattcagagtctgaccagaaattattaatctggtgaagtttttcctctgtcattacgtcatggtcgatttcaatttctattgatgcttt

SEQ ID NO: 1422 - DNA, 271 bp, Nicotiana tabacum
tgcgatatcaccgctatcccacaaggcgtaaccaagcgctgcctgggtgttgctattattcggttccagttccagcgcggcgcgcaaatcactcaccgcggccgggacattatgacgttggcgataaattgtcgcccgcgcaacgtaagcgttggcagaaggcgcaatattgattgagcgcgtgagatcgttcagtgcgagttccggctgaccaggaatgtaacgttgcgcatgcagccaccagtagagggcattgcttcccagtccacgt

SEQ ID NO: 1423 - DNA, 326 bp, Nicotiana tabacum
agatatggactggtgtcacgtatggtttggctgccaccatgcttcatgctggtatggaggagcaggcgttcactacagctgaaggcatattcattgcaggctggtcagaggatggctttggatactcatttcaaacgcctgaaggttggaccatggatggacattttcgatctctgatatatatgaggcctctctcaatttggggcatgcagtgggcgttatcaatgcctaagacaatcccttgatgcccctaagatcaatataatggacagaattcaagtgtccccctatactcctcaggagatgggcgtccgcaaaatagtcga

SEQ ID NO: 1424 - DNA, 441 bp, Nicotiana tabacum
ttttgaaaagcaaaaccaaaaaaattaaattggatgaaaggaatatgacagtgttacctctatggactactacaatatctcagcaaccggataactttgtcaatgaaattaccaggaagaaataagtataggataagattatatcaaaaatattactactaaaaagaaatcatttctcatgtgttggaatatgctgattccctcttctacaattcctggctcaccaaagtgctcaatatcaacagtgtcaaaataaaaaggtggacagggcgagtaaatatatggtttgtgcttactccaacaaacttggaatgatccacatcttcatcatgcaccaagaataggagaactattgctagtataaaccttaagatagagatggaaataatcccttcactcacactgagacgacctgctcaggtgcaggcggaaatgtatggt

SEQ ID NO: 1425 - DNA, 251 bp, Nicotiana tabacum
tttgggacaaagtctttgtttattataaacgattatagtcgtgatcccttcaggtcacaatcacacattcacacattcacacagtaactttattcatagccctaggccctgcattgcaagggaatacaacaaaacagatcatgaaattacatagtatcgactaaaagtccatttccaaaagacctctggttgccgcaatccagattgtcaccaggactaactccaagaatactgcaatacctcctgtaaaa

SEQ ID NO: 1426 - DNA, 205 bp, Nicotiana tabacum
atgaggccagtaggtccggaaatgatgttcctaagtgagtatgcattaccccggtaagcacttggttccctgcagtatagtattttacttggtcctacaaaagttgatgcgacaaatgagtttccttgtgaatgttttattttttcgtggagaacgatggttgagataccaatttttaggttgttttgggattggggtggtgttg

SEQ ID NO: 1427 - DNA, 223 bp, Nicotiana tabacum
ttttaaacggtaaatcttcattcacttcattccagatgaactttgtaaatacagatccacaacgtaacatcacggtaacaatctcacggtcaaaaacgatggacagtagcaggaaccacagtaaaccataacggaacttcaaccaaacttagaaccataaatttcaaaccaaaaaaataaatctaaaggcaacggaaaatctaactcctccagtttccttcag

SEQ ID NO: 1428 - DNA, 223 bp, Nicotiana tabacum
gaagtgtaaagaaggaggggtacttgaattcatggatgtagctcaagagcttgtccaaattccttctactagtgttagggttctgtcttctagtagtaacagtgtcggagccatcttagtctaaggggtgtcggtcttcgtcaaaaaattatactatactatgcatagttaggtcaattttatattatttcacgtgtgtatatatatattatattttgaatcc

SEQ ID NO: 1429 - DNA, 305 bp, Nicotiana tabacum
atctaatgttaatgacattttctatgaaatagcaaatagactgcctcggcttcagccagcacaaaatccatctgggatggttcttatggataggcctgctcaaacaccggctagtgcttcttgttgctcttaaatgtctattagtgcttctcattacaatgctgttttttgtttaatgtgtttgtgctgattgttaagagtttgttgtgccatttctccatcattgtacagatatttcatgaaaaattcttcaagatgatttgactcttttctttgaatcctccctatgtaatgggattctaaaa

SEQ ID NO: 1430 - DNA, 368 bp, Nicotiana tabacum
tttttaataaaatttgggcttttatggaattgaaaaaagtgaagaaagagaaaagaaaatcggatgaaatcccaaaactacactcaagatatgttccagaataaagaagtaaagagaaataaaaaggatgatgaagaagtctaatttaaagaaagaaaaacaactaaagagaaaaaaatgaataaacaaatattagaaaattttaaactaggatactagttaccacgtgtttacttctagtttgatttgtgtacgttgtgcactagcgagtcttctctagattgttgtaggtgcagtgtcccattggaagttttccgatcaacgaacatcgcagttgattttcatttccgaagacgaacttgttgcct

SEQ ID NO: 1431 - DNA, 329 bp, Nicotiana tabacum
cttgctggtccacaatccatcattggaagagctgtggttgttcacgctgatcctgatgatcttggaaagggaggacacgagctcagtaaagctactggaaatgctggtggaagggttgcttgtggtatcatcggcctccggggttaattactcatgtgccgtgaagattctcagctactagtggagggtatcttggaataaggtttcgttggagctgctgagctttgttctctgtgtttttatcatgtgataccttttgtttttgagttgaaccaaccatacatgatgtagctctgcttttcagtgtgtcagttgtactagtttttgcc

SEQ ID NO: 1432 - DNA, 274 bp, Nicotiana tabacum
ttttaaaaacatgactctaattcatttagtagctagaagaaattacaatcacatacaatcaatgacaaagtagcaaaacaaaatactcacaagatactacctactatgtgaaaagctggctatgctagttttctttaataggtagttttattgccacaaccaaatcatgataattcacaaataagaagtgtttttatttgggagctgcagtttgaaagcgaggttgaaaatgggcaagtaaagcatcccttgaaggtaaatattccttaacttg

SEQ ID NO: 1433 - DNA, 391 bp, Nicotiana tabacum
ttttacaaaagtaagtgcttgcatgctcaaatttattactatatgaaattgcaaatttgtaagaaatttcataagccaactgtctgcagcaagagcaaaaaatcataaacaaagaaccttttcctacaataaagattaacaattccaatatatatgcaatcagaagaaactcgagcttttttcatcaaaattattgttgtctgcagttatctccccctcttcagggtccaacttccaagcaaggcaatcagaaaatgcaaccatatcctttgccttatggaagtgtagttctgacttctttcctatctgctccaaaggcctcaactccaaatcctttcacatatacattggtaaacagttctgaaggatcaggcatgggactctcctttgc

SEQ ID NO: 1434 - DNA, 367 bp, Nicotiana tabacum
cctcatccgagctctttcctctcagaaacttaccaagttcagcatcaaatggctggccataggattgcacatgccacattgaaaggccctagtgtggtgaaggaaatagttattgcaactgtacttggtttggctgctggtagcttatggaagatgcaccactggaatgagcaacgaaaagttaggtcattttatggcttgctggagaaaggtgaaataagtttagtcgcagaagaataatttttcgaggatctcgcgtgagttggctcttcaattaaacatgggcacactcttatgtctaaaagaataagtttataaaccaagtatctctttgtctattcattgctccatgtttgactattaagtt

SEQ ID NO: 1435 - DNA, 443 bp, Nicotiana tabacum
ttttatggaaacatattatcacaatatattgtacaacaaaacattacatgaccaaccatccctaagaaccgaatggctttattcatacttgttacaagcaaggtctaaagtagcacaatgtataagttatatacgctaacggcatatataacttacactctttatatattacacataatgatcagttgtgaggctgagcttcagtgactttatccatggcctcacctgcgtaggaacaacaccttttgcatcctttgtaacctttcctgcagcaaccatagcggcatcctctacgtttataaccaccaccataatatccatcacccgccaacgtcattgtatccactacgtccgtcaatagatactccattctcgttatccaattttcattgagttgggaagtctcagcccaactcagcagctacaacctcagagccttatta

SEQ ID NO: 1436 - DNA, 473 bp, Nicotiana tabacum
ttttcttggaaatttttaacgaactgcttaagcttcgagtcaggaaccaaccaaggacagtgaaggccataagatggtacagatttgcaaaaggttccaatagaagaacaatacagagaggacaatactcatctacattcagctaatacaataagcgaagaaagaaaaatagaagggcaacctgcagatgcgcaaagaacaagaatgacataactcagttgctaatcaagcatccaaccatagtatccaaggcacaacgccacgctcagcagacaaaagttgaaatcctactgccgcatatcactggtgtctctggctactaacaactactaatactttacccaaaaagtataaactggtaagctgatggcaagaaaatgcccactagacaaacgaggtccccataattgcttatgcccatgcctcgtgccgaattcctgcagcccgggggatccactagttctagagcggcg

SEQ ID NO: 1437 - DNA, 246 bp, Nicotiana tabacum
gctcatcaaaatgttttccaaaactaacctttttctttgcctttctttggctattttgctaattgtaatatcctcacaagctgatgcaaggcagatttctaaggcggctgctccaattacccatgcaatgaattcaaacaacattactaatcagaagacgggtgccggaatcatccgtaagataccgggttggatacgaaaaggtgcaaaaccaggaggcaaagtcgccggcaaagctgtaaaatt

SEQ ID NO: 1438 - DNA, 459 bp, Nicotiana tabacum
aaatagctcatcaaaatgttttccaaaactaacctttttctttgcctttctttggctattttgctaattgtgatatcctcacaagctgatgcaagggagacgtctaaggcagctgctccaattacccaagaaatgaattcaaacaacattactgatcagaagacgggtgccggaatcatccgcaaaatcgccggcaaagcttgtaaaatttgctcatgtaaatatcagatttgcagcaaatgtcctaaatgtcatgcccaaataatcgtcggcaaattttgtaaaatttgctcatgtaagaataagatttgcaagtaaatgtcctaaatgtcatgaccaaaattaggcctcagagactatgtacttgtgctggtgtgagtttagttttgagaataaagggaaagttatgaatagcctaatataattctattcactttcctctagttaatttctcttagt

SEQ ID NO: 1439 - DNA, 390 bp, Nicotiana tabacum
gaaaagatcactgttgttaagatagatcatgatgcaaatcccaagctcatagaagagttcaaagtttatggattgccaactttgattctcttcaaagatggaaaggaagttccagatagtaaaagggaaggtgcgataacaaaagttaaactcaaggagtatcttgatggacttctaaagacagtttctatcgcataatatttgggctaaagtttagtggttctggtatcttcatcagtttatgatgagatgcactttttgtctggtcaatgttagtatcctgaaattgcctgtaatttgatttgcttccttgattagccaagaatagcggggatgcattgtatattttagctatctctgtgggcgatgacctgtttgtatttgtatatt

SEQ ID NO: 1440 - DNA, 407 bp, Nicotiana tabacum
caacttaaaaccgtgggcaactctattcctagtctaatgggccttaaagaacttgctgactcctcaccgcaagcaatgaacagcatatatattacagaaattgctcaagatggtactgataagttattagagccacctaggcccctattgaggacggcctctattaggtgctgaatggcggtcattcggattgtttttgggttatattatacaagagttgaccatagctggttttcaccggtatactcaatgaatgtattcaaatctgaagatttgtacatgctgagataagtacatgctgctatgtggtagagtacaacaatattacattgttcatatttcactatctaattgtttggagatcttaactgttgtttcttcacaacaggggttctatatttctttag

SEQ ID NO: 1441 - DNA, 487 bp, Nicotiana tabacum
aaaaccgtgggcaactctattcctagtctaatgggccttaaagaacttgctgactcctcaccgcaagcaatgaacagcatatatattacagaaattgctcaagatggtactgataagttattagagccacctaggcccctattgaggacggcctctattaggtgctgaatggcggtcattcggattgtttttgggttatattatacaagagttgaccatagctggttttcaccggtatactcaatgaatgtattcaaatctgaagatttgtacatgctgagataagtacatgctgctatgtggtagagtacaacaatattacattgttcatatttcactatctaattgtttggagatcttaactgttgtttcttcacaacagggttctatattctttagttatttttgtacgttacagagatttttatcttagtttgatatgcatacctcgtcatgtatctttcttttacgctatttcttgcgttga

SEQ ID NO: 1442 - DNA, 357 bp, Nicotiana tabacum
ttttagcagagtaaactaaagtattatcttatttaaaccatagtcttaagattaaacataaactggtagaagcaggctaataccaattacagcacaaccctagaactagacccacagtaagcaagcagtaaccgatagattaaaattgaaaacaaagccaaaaacggcgacttaaatatagataaactagatcatcatcaacgtcatcagatctaggagagttgaccacagtcagcaaccacaacaggcttggagcaccttccagatccagatccaacagcctcagccttcttaatcacatcatagccttcaacaacttgaccgaacacaacgtgcttgccgtcgagccactcagtc

SEQ ID NO: 1443 - DNA, 458 bp, Nicotiana tabacum
cctgtagttacgtttattttaggtgagttttctgttttttttaagtattcttatgttaaaaaggggagcgtgctgcttcttgtggggctatttttttttattttactgtgcaattttcttggtctcattccctacgttttttctagctcttctcacttggtttatacaataactctcagttttccggcctggttggggctcatgctcttggggtgatgtcaattctctaaaagaatgttttctcatttaattccttctggtactcctcttcttttaattccgctaatggttggtgttgagagtgtaagaatacttattcgtccagtttctttggcggtacgtttaatgtctaatataatttcaggtcatcttcttataaggttgttgggtaattgtgggatatcttttattttaatacagtctgggtttttcttgtttgaggtgtttgtttgctttat

SEQ ID NO: 1444 - DNA, 402 bp, Nicotiana tabacum
ttttgcatcttacaataaaatttcatattaattaaagatagacgtaataattaaggtttatttgctcaaactatgaagattttattgtgaattacacaaaaattgtgcaactccttacaataatagcgttggctgcttgctacttttaggcactttcagcccaggtttccatcaattttgccatctggtccgcacctaatctggcacttccgatcgcaacgctggtactctctcagtggacgaccaacgcaggcagtattgcaagagtcatagcaattgacgccttgagcatcgacagtctccatgttagctgataagaggaggaggaggagcagcatagccatagctgccactcctatcattttcttcttcgccatcttaattacttttatgaagactgtc

SEQ ID NO: 1445 - DNA, 477 bp, Nicotiana tabacum
agttacttcaaaatccaggagagtttcatttacaacaacagccttcagccttgttagagcaaatgttgtttgcttcttcatcaatgggtcttttgcaatcacacacattcccctcttattcttcatcttcctcattagctacttcctctgcagcttcttcccctgcatatcccctgttttactctgctcaacaatcacgtttctttcagcccccacaaagtactcatcaaaatcaaactagtagcagcagctccagttttcctgcaccattttggactagttcaacccactacccaccttcttctagttaattttcatacttctttggattttagttttttcttgtgttttaaaaaaattaatcggtatccaattttttttgttttttcttttgtttggattttagtttttgattttctttgtgttttgtagttagcaggtaggggagataggaaataggcaaggactaatactggc

SEQ ID NO: 1446 - DNA, 419 bp, Nicotiana tabacum
ttttatgcaaatatagctattacgagaaaaaggatatgagaatgacaagaagacctattaaatacataaaggctgcacctaaggtctatacttcaacaaaagcttcctcaaactagtatggttcacgatggaaactgttttgctcatggtgccagaaaagaccttcaaagattggagaacctgatacttcggaataggaccaatctaaacagaggccagaatgaccagttctcacatggcctcagctctctttgatatcttcagagaccttagcttggatgatgacttaatagattgtattagagggacctcctcttcgtcatcttgtttttcttcatctgcgtcctggtcagatccactgattgactcctcgtcttcgctagaagtgtgcttgttaaacagcttttttccttgtaagt

SEQ ID NO: 1447 - DNA, 430 bp, Nicotiana tabacum
ttttaattaacaaacttatatgtaattgatatatgacacgtttctgttacattacaccccaaatcacgttacagaaatatatcagattgagaaacaaaaaggaaaagtgatcagaacacacaaacctaagaactgacaatcagttccatggctagctgtaatcttctccttattattacagaaaacacacacattattgtggaatcacaagagagttatcttaacaattgcaagggtcacaggtgcagtttgatccacatttgcagccatttcctcattctgctgctttctctccaaattcctcaaagctcttcatgggagcaacaccctgaatgatggtaagggtagtggatttctccaagtctgggtacatcccacatcctccgcagccactgccgcacttgcagccagatccacagccacagcttcc

SEQ ID NO: 1448 - DNA, 435 bp, Nicotiana tabacum
ttttaaaattcgaacttcatttttgcagtataaactacagaaatacaaatcccaatacgtggttcgaagcacgataataaagtgctgatggagtctaagacttgagttcacagtacatttactgaacgacatatttacacaaattaggataatgtagtaaaacccttgatcacagacaacattcctgggataagttccatctcacaggttaggattagtagtatgggcagcagtcacagtagagaccatggcatcaactccacagatattgtgacccctgcaaatcttgtaatatccatgctctccccagttctctccccatgaattcttgatgatccagtaagccttttccttgagtctgataggagcaaagccatgagaaccataacctactaagagcactccgtgatcctgacaaatccatcttaagggcga

SEQ ID NO: 1449 - DNA, 278 bp, Nicotiana tabacum
ttttgctaatcacaaaaaacaataaagactgaaaattaattacaagtactaatcatactgaggtattcattcttgcccactagatacaggtactaacgtatatgttgtctggaaaaagaattccagaataagtaaatcaaaacttgccgagaacacattgacataatctgataaactgattaaaagactgtttcaccagcagcattgcatcatctaaagaatgaatcaattggcaggtatggaataaagagaaaatgtcgcatttcactgctattgtc

SEQ ID NO: 1450 - DNA, 485 bp, Nicotiana tabacum
ggatgatacttcttttgctgattggttcaccgcggtgcaattggataaagcagcccctggttttgatgcggtgtattccttcaacggaactatattagacggcgttaacaataccttgttcatgcaaggcctggagggcttgaactatctagtagcagaaacagatggagctaatccagagaaagatccccgagtacctgggaaacaacaatcagtaatctcattcacaaagaagaatatccctggaatcaacattcctggcggtgatggattcccaacaaagatattctttaatggagaagagtgctcattgccaaagatactcccaacaagcagctcatctaggaggatatcttcgtttgctgtcactacatccatactagcacttgtggtttttatgttgatgcgacaatagcagtgaaatgcgacattttctctttattccatacctgccaattgattcattctttagatgatgcaatgct

SEQ ID NO: 1451 - DNA, 477 bp, Nicotiana tabacum
ttttagtctgtaatgcccatacattcagttgaataattaagcattgctccagcaatgtctctcaacaccatactcgaatgaagatcacatatagaagtacaagatatacccttggttttataaaaggaaagacaaaaggtaaaataaatttcacatatagatcacaagacaacaaaattggaataaaactaagcggatcatctctgcatcaatctcgtgcgtactttgaaagcaatattttcctgcatattccgtaggggtctagagaccataagatcgctaataaaacttcatcgaacttcagaaaactgcatcctttgctacaactatttatgattgcagaattttcttgtaatcctggaatgtcccgtcgaaaggcgtcaccctgccctcagagacggcccagagttgatcaacactaccagaaattaaatgttcatcgtgactgaccatcagtacgcctccttggaacaagac

SEQ ID NO: 1452 - DNA, 462 bp, Nicotiana tabacum
ctcggtctattcttttgatttataagggattttgccgatttcggcctattggttaaaaaatgagctgatttaacaaaaatttaacgcgaattttaacaaaattcagggcgcaagggctgctaaaggaagcggaacacgtagaaagccagtccgcagaaacggtgctgaccccggatgaatgtcagctactgggctatctggacaagggaaaacgcaagcgcaaagagaaagcaggtagcttgcagtgggcttacatggcgatagctagactgggcggttttatggacagcaagcgaaccggaattgccagctggggcgccctctggtaaggttgggaagccctgcaaagtaaactggatggctttcttgccgccaaggatctgatggcgcaggggatcaagatctgatcaagagacaggatgaggatcgtttcgcatgattgaacaagatggattgcacgca

SEQ ID NO: 1453 - DNA, 430 bp, Nicotiana tabacum
gttggatctgtcctcaaatcccctcttatacatgatgcgttgctttccaggagtgcctgaacaaaaattacgtggtcatctaggttcatttggtatcactggaaatcttgctcttcagcccatgtacactattgtctggtggccaaaaaagcagagttgcatttgcaaagataaccttcaagaagcctcacatattgcttcttgatgagccatcaaatcacttggatcttgacgcagtggaggctctgatacaaggtcttgtcttgttccaaggaggcgtactgatggtcagtcacgatgaacatttaatatctggcagtgttgatcaactctgggccgtttctgagggcagggttacgcctttcgacgggacattccaggattacaagaaaattctgcaatcataaacagttgtaacaaaggttgcagt

SEQ ID NO: 1454 - DNA, 253 bp, Nicotiana tabacum
tacacgtgagcaaactggttaggacctgggacaaggttcaccgtgtgacagcaggatgcatctcacatctgcttgcaccccgtggatgcatgagtaatgtacgacagcctccacatatcagtagagccatttccattccaggaggtgggacaggggtgagtgcattgcacactgcacagcagacataagaagctcctctcggataaagaagaattgtcctacacccactgcacattaactgactctgcatatc

SEQ ID NO: 1455 - DNA, 456 bp, Nicotiana tabacum
ttttaccaattaaacgagacttcatgtttttcgtattaacatggtaaaaataccactaaaatagttttacaggcttaaaatcgtacaaagaattcaaaattactcaatacaaataacgaattcccactaatcaaacacaaatatgaattccactattgcacaagcaagtgaaaagatatcattaggaaaaacatttcctatcaatcctcccaacttacctcacaacaaatactacccaaagagaatcaacattcattcatcaagataatacagcagtagtactcttctttgttttcctgtttgcataaatcttagcatataagttcttggttctgatcgttagcagaatatctaatccgaatccaacgatgcaagctatagacataactatgaatactagcctgtagcagtgagcgccaacacaagtgttgccaccaccagctgtttttgtagcct

SEQ ID NO: 1456 - DNA, 437 bp, Nicotiana tabacum
tcacatgcctgagactcgaggactctgcctgtctgaagaacagaccattagcactatttcaaggcggccacggattggtagttatcggattttagatatgtttactgagccttacaggttaattcgacgatgtgaagtgacagctattttaatcttgtatggtctccctaggttattgactggttcaattctggctcatgaaatgatgcatgcatggctgaggcttaaaggttatccgagtttaagtccagaagttgaagaaggtatctgccaagtattagctcacatgtggttggagtctgaaattatagctggttctggtagtaatagtacttctgcatcttcctcggcgtcctcatcatcctcttcatcaccatctactacttcatcaaagaaagggaaacgttctgagtttgagaagaaattgggtgattttt

SEQ ID NO: 1457 - DNA, 474 bp, Nicotiana tabacum
gtgttgcttatattatggaaatgtataaggaaggaggactatttggtgaacttgcaagctcaattcaggttacagagttcacgataaaagatgcttatactctcaagttttttgagaacaattcaagccggttgccaaagtggtgcaatgccgatgacactgtgaagcttcctttctgtcaaattcgtggaaagtatcggatggaattacccggatacaatactatggatccgtatccccatatgaacgaaagatgtccatctatgcctccgaaatattacagacctcaaggttgttgacaagatttcccccatcttcctcgtagttattgttgaagacataaccaagtaaatacaagtgtgctatctctaacagctaaagcttttagatgagatggtcacacaattcaacaagcatgtcgcatagtataattttttcactcatcagttctcttggagttgtacaattgcctag

SEQ ID NO: 1458 - DNA, 365 bp, Nicotiana tabacum
aaataaatagcaaatatattttacatttcataaattccaaagcgaacctaaccacccatccagcctgttcaacccaacaccaaatcaacgccacaaatttaaaaaaataaaatcctaccccgagctgaattttggttcggcggctcaaaacctatcaattttatcagccttaactacagggttagctttagcaatctctgctttccccttaaatttgaaatcaaaggtacaatcatgctgctctgggtatctatgggtcccacaaaaggtactaccacatctgcacttgaaacccactacccctactttcttcctacaagtcaaacaccggtttgacaccgccaccttcgcctcactcccggcga

SEQ ID NO: 1459 - DNA, 586 bp, Nicotiana tabacum
tcgacctggcttatctagtcgggcgtttgggctgatcgtcaagtactcaagggttttgttgaccttttcctctgtgacgatggagtacctacgtccaagggacaggtcagactcacactgcattgatttgtgcaaaattgaactgcaggggatcgtctttttatcagcaccttttgaattctgaacgatgtccgaaatgttccaacgtgttttgccggtgctttttacctgaacgaagtcgatgtatccatcagatacaatgtcgatatcgtctgtgacctcgcagcgcacactgcggatagtcttgtcacgaagcattcgggtgacatggtaagcggctacgcagtcctgaaataagaaaccgtgcttggcggctactccgcctgaatcgttcgactccatttagacatccgtgacaattttgcgaaaattaaggagatgttatgacacagtccaatcggatcactgcatcatcaccagtgatctaaatacttcacagccattctcggtcgcaggtatcaagcttttcaggattccacaaatattgtaaccctgacgtctaatttggttatataacatactgccc

SEQ ID NO: 1460 - DNA, 276 bp, Nicotiana tabacum
tcatcttctttccctgtgacaagcagtcgtgttggtactgctgatcagtccttgattccctctgttactcagagagctgccagaaccaatgcagatatcccaagaccaggatcgtttgtccctccattccttgttagtcacggttctgctgctagagctggaagttcagttgcctcaccaatgatacctccttatcctggaagcgcagctcggacccgtgaccgcgttcaggctcttcaagcatattttcagcaaccaagtaattcaccagctgta

SEQ ID NO: 1461 - DNA, 490 bp, Nicotiana tabacum
  misc_feature (94)..(94)
  misc_feature (94)..(94): n is a, c, g, or t
ttttatttaacttctataacaacttatttattcacataatgagtgttctacatcagcacaagcaccacatctataatgcaaaaaatcataagangaaccagaactatttttccatgctttcagactcacctatatcaacatctaagatatggaaaatcttgagtctcagtctgctaagagctagaacactcacatgtcatgcagagactttaaaggacccaacatacacattcatggaaaaacaaaatcttcctaggaccttgatatcatgctacaagaacgagtcaatcgaactgtcaggctgcctccatctatggtagcctctcgctcgactggatcctgaacatactgcttcctgcacccggggcaacgcccatcctcctcaagaatcctcttgtgacaaaagagacaaagcctaaacccacatgaacaagggagaaaacttgtgtctgtaaaatccaatcttcacagcatataggacatgacgtgg

SEQ ID NO: 1462 - DNA, 417 bp, Nicotiana tabacum
ggaaatatgatccgtttatagttgtagaaacagaaggtgacaaactcgcaggaaatagaggtttcaatgatgttgcggggtacatatttggcaaaaattcagcgacagagaagataccgatgactactcctgtcttcactcaggcattcgatgctgaaaaatctaaagtgtcaatccagatagttcttccatcggataaatctttgagcagcttaccagctcccaatcaagaaggtataagcttaaggaaaacggaaggaggcatcgctgctgcattaaaatttagtggaaaaccaactgatgatgttgttcgagaaaaggaaaaacaactcagatcaagtcttattaaggacggtctcaaacctcaatcggattgcatgcttgctcgctacaatgatcctggtcgaacgtggaagt

SEQ ID NO: 1463 - DNA, 400 bp, Nicotiana tabacum
ttttcaataacaagaaattttttattcttatttatcagtttttgccttgcccatcaaatacttgaacattcccaattatagatcaagtctcctttccaccagagggccaatacaacattaaaatcaaaatttcacttggattttgccatttctagaaactgaaaaaacaataacctacaccttatggactcacttttgtcaaagcctatcctgataaaaatccaagtatgaagaacaagaaaaccttacgtagtggaaaggaggaacatgagaccccatttagccgttctcagcatgtcctagcctccttcaaatgcttagtatccataacctgaattgtccattgggtttccagcaaccacaggttcaggctccttgttctcagtaactacagcatctg

SEQ ID NO: 1464 - DNA, 294 bp, Nicotiana tabacum
agcagacaaaggagagaagctcaacagatgaagaaatttctgcagaaaaaatagcaaattctttgttgaacgaagccagaacattgcgcacaaaagataacacttccataattttcttagattttgacaccaccaatagaattctttcttgtaaaattgattcataggattgacttcacaccttcatatatttagtattacagtgatgtttatctctctctctttttttttctgcaattgaagatcagttaccttctgttaatattagtgcaacccctcatgttattgacaaaa

SEQ ID NO: 1465 - DNA, 406 bp, Nicotiana tabacum
tatcaatagcataaagtccatatctgtcttgcgggacctcaatgcttgtgtcagggtctaaattggcagttctaccagtagaagggtcaaagcgacaccataacttgtcacaaaactcatggtcagcaccaaggattcggacccaaacccgctcggttcgacccgttttcttatcagtagcgttgaggatcgatccggcgatacccggaaccaataaaaccgggtcaagggtcgggtcaatgtactcctgaggcttcttaatcagcttcagccacatctctattgacttcaccagctcctctaataacaccgccatctcccccaacgactaaaaaccctaataaaatttaaaggtttattagacgaaattgaagaaaaaaggtgtatatttttggtttgattggac

SEQ ID NO: 1466 - DNA, 468 bp, Nicotiana tabacum
atcgccagctatggtgaattatagtaactaaaggtgccttgcatcacatatcatgtcaatatgtagatagtttatatgtaaatagataactctcatgtctttttttttttgcaagcacatatcatccctgaattgaggggattgagcttgctgtcaaagcataaactcctggaaaagctaaatgaagtctctgatttgtagtgcagagtatgcaacattgaactcgattggagcaaaggaaagaattgtacagatactttattttcttctttttttctctttcagaatatagatacttctcttagctagaaagaaattagatgtactaaatcaaagtcgtaaacttacgtcgacaaatatgctatgttgtcattgaacactttagaactgaagaaataggaagcttgtcgttatgtatagtagcattcaagtctcaagtcaaaaacaacaaatagtaaatccagtatt

SEQ ID NO: 1467 - DNA, 387 bp, Nicotiana tabacum
gagctctctttaatgcagctactgcagcttcctcggctggaggaatatatgcaccatagccaaggcgtggatatagccatcgtgcaatgtttgcatcaatctcagtggcagaaaaatcattccattgctcgatttgagcatattcaatcaatgatgaaccaaaaaggggattgtcgggcttcgatttagtaacatagcgtgcaatagcattgctctcgaaaacaggtccatcgggtgtttcaagcacaggaacctttccaattggattcatcttgataaactcaggtgtcttgtttgatacacccatctcgaaattctttgcaagttcaacctttacacctgtgtactcagcagcaatgagtgcctttgaggcatttttgttgttat

SEQ ID NO: 1468 - DNA, 244 bp, Nicotiana tabacum
ggcattcggagcgtcgatgatccaaagagtttcttctctgtaactttttattgggtggttcctgggaggagtatttcaccttaaacaaacactgcaacaaataccaaatcacagaaaggacgacgaacaggactcgaaagtaatctctcattcccctggtacaattcacctacatgcatgtgatggcaactgctacctaaacagacgcatttgcagcaagagcagcaaggactttccacttctg

SEQ ID NO: 1469 - DNA, 387 bp, Nicotiana tabacum
ctgtcgccaatagatcttgacattgcaaggacgccaaaaacacgatgtccattccactgaatgaccttgccaccagatgcttcaattctagcatactcatcttctctgcttggtttatgatcaattgacagtgccattgcttctttgccacgataaaggactgctcttgaatccccacaattagaaactacaatatgagatgaacatatcaccgctacaactgcagtggaccccacagtttccggggcaataggttcagaggcgcagctagtggtatctatgttgtcttcaccgggatcactgtttactttccccccaacttcatcgtcaaccttgagaaagcaactagtaaagaccttctcccactgcacctgacgtgtgtccttt

SEQ ID NO: 1470 - DNA, 267 bp, Nicotiana tabacum
gacgatagtttcctgtaggaaactgctttgattgacttcgggaaattcatccttaatgtacaaaagtgcaccagatattactcctgtgtcgtagccgaaaaggagacctccaataccggcaacgaaagtcaaacccaagacatagggattgctgaagtaagacactactttcctattactaacatccaagtaccctgaacttcctggtaatgaaacaatcgtcatctcttctactccaaataattatttcaatcaaaaatctcagag

SEQ ID NO: 1471 - DNA, 258 bp, Nicotiana tabacum
gagttagttcgactcatagaagttccatgagttgcaaaccaattaaagctgcctactggaccccattcatcatcaacaaactttaaaagggtcatttctttgtcaacatcatacttatatttactacgttccccagcagggttattcaaataagcactagggctacgattcacaccagcatccagtagctcccctttattgacaaatattgatccaggtcggaggttttcatgagcttgtatgatactttgctcaatc

SEQ ID NO: 1472 - DNA, 413 bp, Nicotiana tabacum
tgggagaggagtcctacaaggatagcactttgattatgcaacttcttcgtgataacctcactttgtggacctcagatatgcaggatgatggaactgatgagatcaaagaaccatcaaaagcagaggagcagcagtaatgtgagtgaagcctctttgcttaggattgaaatcctatggactttgctcattgatcgaaatttgctgtttgtgtagttctgaattccctgaattgtaatacctaaaagcactgtttcttgccatttgttgttttcagcaaagattatttttttccgcagtatttcccttgtatttggatgctccggtgaaactctcttattttcgtggaaatgaattcttgtttttacggagcaaattatcattttgtatttccattttctctaaggaatgggaga

SEQ ID NO: 1473 - DNA, 412 bp, Nicotiana tabacum
aagacaagaagaagattgaggatgccattgaggaagccatccaatggcttgatggcaaccagcttgccgaggctgatgaatttgaagacaaaatgaaggaactcgagggcatctgcaacccaatcattgcaaaaatgtaccagggcgctggcggcgacatgggtggcgccatggatgatgagggtcctgctcctagcggcggcggtgctggtcctaagattgaggaggtggactaagttggtgctcctatattgttttttatttcttaattagagacctgcaattttattttaaagatctatgtggctatgatttttgcttagtagttgaattatattattttcattctgcaatcaagtactgctatcttttatttctcggttttcatcaaatgtttgctcttccttaaaaa

SEQ ID NO: 1474 - DNA, 266 bp, Nicotiana tabacum
ttttcaatcaaacgagattttttttattttatatatataagtaatataatagtaagaacacaacatctgaccatagacttagtattacttctctcctaaacttaaggagctaatttaaaatttagaacattaattaaatgaaacattttagtaataatatttttcttcgtcatcatcagtaatccttgagtaatttccggacctgttccagtgtaacaaagagcacaatagtgaatggtccttgccttgagattgtagggatgtaa

SEQ ID NO: 1475 - DNA, 426 bp, Nicotiana tabacum
ttttctgaagtgtcgtactcatgacattatatattggggccgtgttattcaacatacatatttactgcattgtcttctctaatactcaatactactactatactcaaaccacaacatcagagcaccgttgacccgtatcaattgtttttcctgcccctgattaaattaacacactaatcgtaaatctataaaatgtgggctcaggcccaataaagcctaataaatggtgaattaaattagagcgacatcaggaatggattcagtatcggcaacaggcaaattctcgccggagatggacagtttcccgtcggacttggtcttcttacagttgtctctaatggccgtcagctcataaggcgacgcatcagtagcaagccactgttccacttcgaaattctgttgggtgcaaacggaaagcctccttaa

SEQ ID NO: 1476 - DNA, 307 bp, Nicotiana tabacum
ttttctcctttaatttcttttgccacaaaaatttttgagagttaaaaatagtagtacaacaaaaatctacaagagcacaaaaccttcctttcaccccatccctccctactaaagaatggtataaaagaatggcagaattcagctgcacataaactttacatgttttacattttccctgtgggacccttccaagtatgtttactgaatctatcattacactataccaactccattaatagggggtcacctgctgccataactctgatcagctttatgaactcttgctcacttgatactttccagggat

SEQ ID NO: 1477 - DNA, 467 bp, Nicotiana tabacum
tttaaaatagaaactttctcattcaataaatattaacataagtgttttaagaaataaaaagaaccacaaaagcgcgaatccagataaagaagaaaatgagagaagacaaggaaaaaaaaacaagacaatcactctcctcaaactacaaccaacctagaagagaaaagacttcgagctggggatggtgccaggccaaaaaggtcactgcaggaggcacctcacaaatatgctgagaagataacccaaattgagttgaaacatgagatacactggcaataattgtttgttgccctccattcatagccccacctccaaacttatccatcccagcaaaaccacatttactggggacataatagcaaaagcgggaaaacaaataggaaacttgcacttttaagtaaaaataacagcaccttaaaagcacttcctgtgaacaatggaaggaccagactcatcatactcaccct

SEQ ID NO: 1478 - DNA, 325 bp, Nicotiana tabacum
gtgccaagtaaggctccccagaaccagctgtctaagctcgttctctatttcgtccatacttatatgctcaatgatggcaatcatctcccaagactctttttcaagggctttcatgtattagaatcatctgaaaactttattgttctttttaagagtgtaaatttagatgtctcttctggtgttttacgcccttggtctttcttgactttgacatgcatgaataccctttcccttcataattaggcgttaggtccatttttgatttagttgtgggatcagttttgtttttgaattttattaaaaacaattttgttcctttgcaaaa

SEQ ID NO: 1479 - DNA, 428 bp, Nicotiana tabacum
tttttctcattttcactacgtatatcttcattttccccattttcactacttatatcttcgattcctccaaaacccacttccaatttcgagtttcccacaacagccacctcaagatttttcccattttcactacttatatcttcgattcctcctaaagccacttccaatttcgagtcttccacaaccacccacctcaagatttttcccattttcactacttatatctccaattcctccagaacccacttgtaatttcgagttttcaaacacacccacatcatttttcccgtcaaattccccaaattgccgatcctcagacctttcactaccagagtcaatccaggtcggattatccgattcctcagaaccgttaaaagcagccaaaagtaggagtactgtgagaatctatggagaaatacctcgtgcga

SEQ ID NO: 1480 - DNA, 415 bp, Nicotiana tabacum
ccagagagattcttgctacatgtctatccaggtgaaaccttgatcacagaaatgtggcctgaagcctcgagagtcatatatcaggtgaaggttaaagaacgcaaccgggcagtgcttgtgggatttgtagatcttgatcgtattagttcgtctctgtaaattctcatggtgtttccaaggacaggacaccttaattatttaagtttgtattcctatatctaactaaaatacattcttgtactcaagcaatagatgttgaggatcaatagcctatggcaactagctaagaattaaggcatgatttttgtaaatatgtgtgatcagtgatgggcaataatgtgccagacacgttcatgtagactagtatagtagaaaagctggatcgaaaatatttaaaggtattttgagactaaaa

SEQ ID NO: 1481 - DNA, 317 bp, Nicotiana tabacum
gttgaagcaatggtagccctggcgcttgtggatcagttaatggctcattatgcacagtgtatgctgttcccaattaatcctgcattgcaggaacctttgcagtcatcgacacccgagtcagctgaggttaccctctgaatggagctgagcagcttttatgtgtaatttttatcaacaccttagtagttttactgtttagaggagacggatatctcctttttgcctctttatcactcatgggtaagccgggacctatcttaagtgcatttacgtcaatgtaaaattgtgcgccattgattaggcaattttaggttttt

SEQ ID NO: 1482 - DNA, 409 bp, Nicotiana tabacum
gatggattatttactgcaaaataagagcaacccaactacaggaaataatacatgttcgtcgatggaatcaatagtacccgtaaaatctcccactcaaggaagcaatacagtcacatcatcatcaggccgtgagagcagccaggcagaagtggacgaattagaattcttgaatcgttgtcgagatgctggggttgtacacattcttggaaacactgtagttagagcaaggagagactctaggttctataagaaaattgctatcgactatatatatgcgtttcttaggagaatatgcagggaaaatagtgtgatcttcaacgtacctcatgagagcctcttgaacgttggacaaattttctatgtataaatatttttgcaaatgatcaatcgaggatattattgactaaaa

SEQ ID NO: 1483 - DNA, 370 bp, Nicotiana tabacum
  misc_feature (262)..(262): n = a, t, c, or g
ttgggaggcgatcatgtcctgaaaatgggtatcggtggcggcgcatcgaaagccgcacagacgctcagtgactactacatcaaacgtgccgaacagtatcacccggtgataccgattggtgcgggcaacgaagtgaccgtggtgttccaggacggcttccagctgaaaaccgtggaaaagatggcgctggaacgcacgcagagcagagcggaagaagacaatccggaaagtccggttcctgttccgccatcggctgaaagtnatcttaacggctttaatactgaccagatgctgaagcagctgggcaacctgaatccgcagcagtttatgtccggcagcagggagggggcaacgatggcaaataatatgt

SEQ ID NO: 1484 - DNA, 462 bp, Nicotiana tabacum
gggtgattctgaaggttcatccagatttgaaagcttgtccaaccaaaggatcatcctgttgtcaagattatgggagcaagagtttctgatcaaaagaaagctaaatgattttaattgaagcacttgtgtgaaagcttattatgaaaggattccacagctggggacgttggcattggtagctgatgtaagttattccgtgatcgtgttcatttgtgctagttatataggatgattaggtgatattatctcaatttttggaatctttattaggactgattttatgccctttagatgagtatgttgaaatttttgggaaacaagagggagccctcatgatttgaagtggcttctcttcttgagtgtcatcagtaactgaattgtatatcaaattgctaatgtccaaataattttgcactactgggctgtgaaatgtgaaacttcatgactttctctgcgcaaaaa

SEQ ID NO: 1485 - DNA, 435 bp, Nicotiana tabacum
actgctctgagttcctgttgaattatgatgagaggaggttcaactgctgcatggaatactgtcgcgagggcaaaatgacctgtcctgttgaggctgcaccttgaagaaatggttgccctaaaattatcgcctcatcaaatggaagtacactgctttttctacttccggtgtttagtagtagtagtaaataagtgaggcatgttacgtactcttatgttttgtaataattatgctttttaataatgtaatctgtctgtgtgcatacaatgcacacgacgctagctactactttttatctactaaaaacgaaaagtaacttatttctgatcgctgaatacttatgctcggaaagccagcattctctagttagaaactagaattgtgttaccaattaatcatatatatttaaactgttacatagatcgattatttaaa

SEQ ID NO: 1486 - DNA, 515 bp, Nicotiana tabacum
cggaggagaatgtgcccgcgaacttagggttcccggaggctgtaataacccttgtactacattcggaggacaacaatattgttgcacacaaggaccttgtggtcctacatttttctcaaaatttttcaaacaaagatgccctgatgcctatagctacccacaagatgatcctactagcacttttacttgccctggtggtagtacaaattatagggttatcttttgtcctaatggtcaagctcacccaaattttcccttggaaatgcctggaagtgatgaagtggctaagtagagtggctatttctgtaataagatcaccttttggtcaaattattctatcgacacgttagtgtaagacaatctatttgactcgtttttatagttacgtactttgtttgaagtgatcaagtcatgatctttgctgtaataaacctaagacctgaataagagtcacatatgtatttttgtcttgatgttatatagatcaataatgcatctggattatcgtttttaaa

SEQ ID NO: 1487 - DNA, 381 bp, Nicotiana tabacum
gggaggaggatgtgtcccatgttaatcgtaccgactatcagctgattgacatctctgaagatggttttgtgtctcttcttactgaaaatggaaacaccaaagacgacctcaggcttcccaccgatgaagccctgctgagccaggttaaaggtggatttgaggaaggaaaggatcttgtgttgtctgtgatgtctgcaatgggtgaagagcagattgccgctgttaaggacattggtaccaagaactagtcgcgcattctgcagcataaataatttgctttagccaaggcattttatatcttaatcgtggtactttgatatccgttgattatgaactcgacttatatcctattggcatggcttgaatagttgaactttaaaa

SEQ ID NO: 1488 - DNA, 371 bp, Nicotiana tabacum
tcagtgatcttgaagaagatgattcagatgtgcccgcaaattcaaagaaagtaaattacagttctgataaggactcacgagattgggtccagttgaggaaaagctccagtgatatcagctctgtgaatcaaggtggttctgtcaaggaaaatgtgcagaatcctgatagcaaagaatcaaatgattggctggatattgatgacattgaggtggcatgaccttatgtaaggtttaaatatagttatttccgctcatttattgttgtgaatagttgttccctatcctcctttctccgctcctgcgactaagaattctcaactatatgtttgtacataaaatgcataatgaataatagttgggttgctccctaa

SEQ ID NO: 1489 - DNA, 408 bp, Nicotiana tabacum
gtgtcctctgggtcgagtagagtttgagttcgtcgtcgaatttgagtttctccggcgaggtcccatcgaggttgtcgccgtccaaggttttcggtgttaaaacattttcagattcaaagagcttttgactcctaaggttctctcttatctctttgactaatagatccagtaaaggtcaatttctaactcttatgccttaaatctgttattgtttgttattatgtgaatgaatttgggttatcttccctgaatgcactctgttgatatgaatttcacatgggtttgtaattttctttagatttcatttcattcgtatttttaattagttgatttagagcttgaatgtaactttaagactaagtgaagttgatgtttgaattaagtggttttgtaattaggatacgaaaa

SEQ ID NO: 1490 - DNA, 421 bp, Nicotiana tabacum
aagaaatccagtgcagtaatcgccgagatcgatagactcaacgagaatactgtaggcgttgatctggaatgatcaggggcttcgtagccgcccgattaaccactgatttgacgcttctgttgggctaacaccaccacgtcatttctattttttttcttgacttgtaattacagaaagtcatttctacttttacttatccaaatcttgtagtcggtgaatttcgtaatatgattaggataagatttgatttattctactcaatctttagacggtttgacaaatgtactttttactttgtgtagtttaatttggataatgttaaggaatacctggcacagttagctgccttccttttccatgtatttcaagaaaatttcaaggtttctaagcattttaagataataatctttataaaggaaaa

SEQ ID NO: 1491 - DNA, 259 bp, Nicotiana tabacum
acaattttgcgatgcatccggcgaaacacattggtgcgcataccaaaaaggcgagggcggggatcgtagtagcggaacactacgccagctgccgtcagttcattgacaaactcatcgctgagatccggcgaaccgtagccatccagcaagacttccgctttaaccccgcgttgcgctgctgccagtagtgccgcatgcagttgtttgccgacgtcatcctcaaaccagataaacgtttcaagaatgatgcgttcttgtg

SEQ ID NO: 1492 - DNA, 438 bp, Nicotiana tabacum
gttctgtttgagtggggatatttctccgatcacgaaaacagcttcccgcaagagctgctggataaactggtcgaacgcgctaatctgccgggttacctcggtaactgccactcttccggtacggtcattctggatcaactgggcgaagagcacatgaaaaccggcaagccgattttctatacctccgctgactccgtgttccagattgcctgccatgaagaaactttcggtctggataaactctacgaactgtgcgaaatcgcccgtgaagagctgaccaacggcggctacaatatcggtcgtgttatcgctcgtccgtttatcggcgacaaagccggtaacttccagcgtaccggtaaccgtcacgacctggctgttgagccgccagcaccgaccgtgctgcagaaactggttgatgaaaaacacggccaggtggtt

SEQ ID NO: 1493 - DNA, 353 bp, Nicotiana tabacum
cacatgggagactgtcaagagcctcaagcctaaagcttaagtgaggtcttgcattttggccattatttttcttgcagaccaataaacaagcttcatcatatcatgcattgttggcaggagaagggaatttgtgtctccattgaggattctacgagctcttgagtcattgaacatttgttatttttctttcttttttcacccttttctgcagtaccttatttttatgttgttactgttaagtagcagtaagtttccctgttaagtagcagtgaattaagtttcccttgttctatcaaaaaaaaaaaaaaactcgagggggggcccggtacccaattcgccctatagtgagtcgt

SEQ ID NO: 1494 - DNA, 356 bp, Nicotiana tabacum
tcagcatgacaaaaagccaatcacaaaaagtagttccagcatgatgctctcccaaatatgaaatctcttgctggcattacaagaatcatgccaaaaataatctattgatttaacagcaaaacgccccgcgacggtgcgcagggcgtggtgaatttgactactttttggtgaaaagttaacgcttatccgccaccagtttgagcgcgtgttcccagcacattaatgtctgcacccgctttatgggcattttcacttaaataacgccgccactgccgcgcgccaggaataccctggaacaagcccaacatatgccgggtaatatggccgagatacgtcccctggctgagttcacgctc

SEQ ID NO: 1495 - DNA, 375 bp, Nicotiana tabacum
aacagcgctgttctcgggtaatgaatggggcatccataccgaccagacaaataatgccatgcagataaaacgttccagttggttgcccttttggggaaccaggataggcaagcggaaacgccagcggcatggccagagcaggggaacaccggcgggtgtcagcatatcggcaagtatgtggctcaaataacccagcaccattccttgtagcgcatcagccggaatgaaccagccttccggaaccttaaggtaaaaggttgccagcagcgcaaataccgccagcagactgtgggtaaaaccacgatgcccaaaagcgcgggcgatcggttttgatatccattttaatcgctgcccaagaaacgactttgggtgatc

SEQ ID NO: 1496 - DNA, 360 bp, Nicotiana tabacum
ttttaaaaccacaaacaaaaattaacatgttttttcacagtagtggaaaagaacttcacatcaagctcttcaaaaaaaaactggaaataataattcccaaaaactaaaacaaaaaaaataagtatttaaaaaacacctcatcacgaaattccatgtcatcatcatcatcatcgccagccatgtatattcattcattcaccttaaagagaaccagtcaagcacatcccaagcaacgcgccgctgcgcaaatgccacgcgctcatcggaaaccaacggcgaccggcaaataggacagttaaaattaaacgtatccaaccacccgtcaaaacactccttgtgaaaaacatgccagcaggccaa

SEQ ID NO: 1497 - DNA, 318 bp, Nicotiana tabacum
ccgaatatataaaagaagctaacagtggaggctatttgcagctgaataaatcattttgaagtacagattacagggatatagttttcagaaaattccctgttattttcataaaccaatgcttctgtttaagcattggtttaggaagttctatagaacgctgctgattggattatgtgattgaagaaattgtacagcttccaaataccaatggccagtatgattttgtatttagagtacaaataaagctcatgtatatgtacaactactatttgttgatcacaaggttgtgaaataatacaagtttcattataaaggaaa

SEQ ID NO: 1498 - DNA, 507 bp, Nicotiana tabacum
ccctaacagatctaatgtgcccccagaggaattatatgctactcagctaactcagttacaagaaatgggtttctttgacactcaagaaaatatccgggcactgattgccactgcaggcaatgttcatgctgcagtagagcgacttattggaaattctggacagtagtgtcagtatttgactataggacaacacagcaactgatggctcggtgaattgatcgattttggacacaagggagcgtcatatcatgctggagataaatattcaaaattttagtacttggatccgcgtctcatcgtctgcccgttctcttttcacttggactaaaaaagaaagtgatgaaagatctagttcttgagttccccatacatgagatgttaaagtcagtttcataattagtttaatataatgttatctattctccgcctccatgcgacctcagattttctggacactatttaattttcagccatagtcatatatctcagtccactagatttattaaa

SEQ ID NO: 1499 - DNA, 356 bp, Nicotiana tabacum
ttttatccaggattaacgaataatatatgtaaaataataattctcataaataaccgtgtagttctatatccatatttcgagcttcacactttctctactactatttccaataatacccaaatggtaccatctcaaatgaatcttgagcagaaatatagagaaaaagttttaagagaccaaaatattcaagggtatatttgttccaaaagtacacctctctcacctcccaactcctttactcaacatttccttgtacctaataatagaatcaagcctctgtaacttcaactgctgcctaaacttgttaataaaatcatcagctttctcattaactgcttcatcttctccaaacgacg

SEQ ID NO: 1500 - DNA, 259 bp, Nicotiana tabacum
ttttgcacaaaaattaccttttctataaatgcatatggaacagacttatataagaaaattacccaaagctgacgaccctgctacttcagggatcagcaaaggaagaactaagtacactttgagaaaaacgagaaataacactatataggagtgtacgtgtaattgacttcttgcctctagccgtgaaaagcggcaaggctgttgatcaaagccaaggcattgctcgtcatatgtgcaacgtccagaatccttcccctta

SEQ ID NO: 1501 - DNA, 335 bp, Nicotiana tabacum
acttatgcattgcaagtggaacacctaacaatggcacatttaatccagggtttcaattacaaaactccaaatgacgaggccttggatatgaaggaaggtgcaggcataacaatacgtaaggtaaatccagtggaattgataataacgcctcgcttggcacctgagctttactaaaacctaagatctttcatcttggttgatcattgtttaatactcctagatgggtattcatttaccttttttcaattaattgcatgtacgagcttttttaatttggtatatttgtaacaataagtaaagaatgattgtgctaatatataaagatttgcagaaaa

SEQ ID NO: 1502 - DNA, 267 bp, Nicotiana tabacum
tcctgcgcatccggatattaaacgggcgcggcggcaggttacccatcaccaccgaggccagatactgcgaggtggttttgcccttaatggtgatgtctttttccgtcacccagccaccgttacgttgtatctgaaccagcaggcggacttccgacggattcctgtcaccctttgaggtggtttccaccagcgcctgtacaccgaaggtaaagcgcagtacggtcgatgtttgcagacgtaatggtgcgggtgatcggcgtgtcatat

SEQ ID NO: 1503 - DNA, 247 bp, Nicotiana tabacum
ttcttgtgatggtgttttatagtaatagtgctgtgtgcctgattacacctggataagtttggtgagaagcggtttatgtatgtttgccagtttgtttccttccggggtgatacagtagagtgttgggaactgcatgttaaataaatgttgtggttgtgtttgaaatagctttcactgactagcatttgctataaatataaataaatggtgtgatgatgttttaaatagttttctttgactagcaaaa

SEQ ID NO: 1504 - DNA, 334 bp, Nicotiana tabacum
ttttaatacgaacctctttcattatacttatacaagagtatacaagtacaaaaaataaggtatgtgctaaggaagtttgcacacacaaatctaaaactaatatagtaacatttgcaacttcattattcatgactaagacataacatcaagactcccgattttatagttgtggttgttggcttgtcaatatataataatgttattaaatggctaatttctcgagtcgaggtctttcgaaaatagcctttctacctttcaagatagggggtaagttctgcacacatattgacctcccaaaaccttactttgtgggactatattaagtatgttgttg

SEQ ID NO: 1505 - DNA, 461 bp, Nicotiana tabacum
tatttgaccaacatcattaattaactttaaactttcaaggcactctagcttcttgacattgttgaatagtgcagactcgtttgactcaagaagcatacctatgttgccacgaatgcccaacttcttcatatttggagccctcacaaacacatcttccgtgcaactttcaggtgcaattgtcgaaagagtttgtaaagcttggtttaccagggcagctttactactttttggggcacgtaatatagcagaagcattagtgtgaagatgcctcagtcgtggcatgttcaatatgtctgcttcaatgtcaagagtcctctgttgtgtgtcaacaataagagtttgcatgttccaaagccctcccatttgtccctcgtgccgaattcggcacgagggaagaatcctagattttcctcaatcgaggtttataagattgcagaggagatggcttgcagttttggacc

SEQ ID NO: 1506 - DNA, 269 bp, Nicotiana tabacum
acggatcaagcagatcgacgagctaactatcagaaggtaatttaatcagcttcctgctctaaggatgagaagccaattggagttatcttttaagagattgaagaatgttgttgatatatattcagttactaatttagcaatttttggctctctataggcttcatgtggagtgatgaaacttgaattctgtggatttatactagttccaaattgtgaaatgtatatcagccattgtaatcaatatgatctatattgttttgatttcaaaa

SEQ ID NO: 1507 - DNA, 301 bp, Nicotiana tabacum
atggaaatgaggaaacagaggattggaatataggaggattactacatgaagtatgttgatatatagggcaggttaattagtggtgagtctatagcatattttcttgaccttttttcttcttttagcaaaattagtatggagtctaggtttgttgtaatggctagagggttactgaaccatattatttgttttaatttccattaaaattcactagggaattttaaagtttcaagctatactttttgcttcttcatttgcatggttttggaaatgatgaaattttgtgtattgagacgaaaaa

SEQ ID NO: 1508 - DNA, 269 bp, Nicotiana tabacum
tttagaaaacagcatttattcacctactatcttagggaattgagcagacaattgaactcaacaataaatatagtacaaattacaccactaaagatacaggctgtagaacaagaagaacctagtgcctaaataatatcacaagctcatcatatatgcacacaccacgcaaaactatggtacagacacaaaattagcagatatttaacctgcagctgtggtacataaaatacaacgcatccgcgggacaagctcgtctccaagggcgaatt

SEQ ID NO: 1509 - DNA, 305 bp, Nicotiana tabacum
actgatgctgaggtccaatcaagcaagaaaaagaacggatcaagcagatcgacgagctaactatcagaaggtaatttaatcagcttcctgctctaaggatgagaagccaattggagtcatcttttaagagattgaagaatgttgttgatatatattcagttactaatttagcaatttttggctctctataggcttcatgtggagtgatgaaacttgaattctatggatttatactagttccaaattgtgaaatgtatatcagccattgtaatcaatatgatctatattgttttgatttcaaaaaa

SEQ ID NO: 1510 - DNA, 215 bp, Nicotiana tabacum
ggagacgagcttgtcccgcgacaatgaaatagaaggatgggctcaccagaaaaaggaaaaaaaaaaaagatcaagaggaaataatcgcctcaaaaagggaagggaaaggagtaactttattttcagatttgaccgcaatgcgaatgccaatatttactatttcataaagtttaagacacaattacttaaagcttattgaaattctgggatctaaa

SEQ ID NO: 1511 - DNA, 186 bp, Nicotiana tabacum
ataaaaataatacatttggtgtcaaattatttcaccaaggcaaagtattagttccacatgttttcaatagcttacttatctttcactggaacactcatttctgtgaaatgagtttacatataatttgatgatgttaagctatttattccctgtaatggtaaactgatactccatatttctgataaa

SEQ ID NO: 1512 - DNA, 318 bp, Nicotiana tabacum
acatcaaaggtatgattgtcggacatttccacaaatcaaactcggcagtagtgtttgttggtctggcgatgaacagttagtttgagaagttatgtaaagagatggtgggggaaacacgagtgtaggctgtaggtcttatgtttgtagttcatctaaagaattgtacgataaatgcctaatttctgtagcttttgaaccccgccttacgagattcaggaaataaatgaagaatattgagcattgttacttagcgcaaaaaatcattgtgaacataaatgtaatagatcagtaatgtagcaatttatccttggtttaaaa

SEQ ID NO: 1513 - DNA, 196 bp, Nicotiana tabacum
ttttacttaaataattctgtttcatagaaacttaaaaaacacaaaccctgtaaaaatgaagccacaaacttgggcatcatatttactgtatctattttttcctataccaactcaatctctacccattttgttatgggccgcccatcttctctgcgccgggacataatttagacatataacaaagcaaggtaaggtg

SEQ ID NO: 1514 - DNA, 247 bp, Nicotiana tabacum
ttttgcaatagcaatatatcatttagtacccgaatattcagatcaagaactgtttcataagctgtgagttgattacttaagttgtaaaatatcaacactgaaactggaagccaaatgcacactgcatccctacaatgacaaatttcttttttcccgtcaccaagtaggttttatttcctggaattgcagattctagctggtgatctacgcccccgtcaagggcgaatctgcagatatcatacactgg

SEQ ID NO: 1515 - DNA, 194 bp, Nicotiana tabacum
acccaggagtctacaggcaattccagccatttgcaggagacagtagacactcaaaaattcaaaatgattgtccacattggtgcttgcctggtccaatagattcttggaatgatttaatgatggaaattttggtcagcagttgaaatgggaattgcatcattcttttctttcctcagagaactgttttcatctgc

SEQ ID NO: 1516 - DNA, 364 bp, Nicotiana tabacum
ttttgaaaaatgcaagcacaactatattattgcagcatgagatttattgataagatttagaagcataaatagcaattgctttcccactttatcaattcagttaaaaataaagatttaaagcatttgcagcacacacaagctgagatgacattcatcaacaaagaaatgtatactatttaacccaaacagaattcttccatttcgatgctctcctgaatccttctaatccaagaaacaactgctccttcagcgcgacaacgttcggaagacgaggtttcctcctccattttctacacagtgggtaacaacaaagaggaacagcaagcaaacaccatgtttgtgccaaactaattttctggtgttg

SEQ ID NO: 1517 - DNA, 215 bp, Nicotiana tabacum
  misc_feature (156)..(156): n = a, t, c, or g
ttttgaaataaaacattttacctaccataaaaggttaaaatacattatcagcattaaaacattttatgttgtctctatatataaattaattctatagtgaaccacatggcaactccaaggaactcataattatctcccccatcttcagatttccangagtatacaatggtgatcgacgtccccgtccaagggcgaattctgccagatattcatca

SEQ ID NO: 1518 - DNA, 336 bp, Nicotiana tabacum
ttgagagctcggataccattgacaatgtgaaggcaaagattcaggataaggagggtattccaccagaccagcagaggctgatctttgctggtaagcagctggaggatggtcgtacccttgctgattataacattcagaaagaatcaactcttcacctggttcttcgtctccgtggtggcttttgagaattcagtgttgtggctcttggaactattgtctttgtttcgaccctttggttgaaaaatgtttttagacttgtgtgatttgttttgatgttcgcttgtttttatcctgtctgaacactcgtttctttaataaatttagcttccagtaaaa

SEQ ID NO: 1519 - DNA, 371 bp, Nicotiana tabacum
ttttgaaataatctttaaggtagaacaaaattcagacaaacacaagttaaaataacaaaaatacgaaaatctaacttgcaatggtccgagaatcctgaagaatattcttgaacaagttggtccataagaccatacctttttccatgactataatatctatccaacttaaggtggtaaagtacttcgcatcgaacaatctccaatcgagagatttacttgggaccaatatccttcagggcacaaatctgctcctcacccatggctgacatgacagacacgacaaggtcttttccctcagcaaacccatccttgatctgtgtaaggaggttgtcatcagtaggcagcctaaggtcatccttggtgttaccatt

SEQ ID NO: 1520 - DNA, 354 bp, Nicotiana tabacum
tactgccatgtggtgagacagagatcgataaggcccacaaccgtaggtttcactgctcgttcattggcgagaacgaatcctttggaagataggaaagaagggagcagtagccacagataaccactgttcaaaagttgggaacttgctcattgtacatgttttccgagctggttctgtacacaactacatacatggaggctacatcgtcgaggtccagttgacgcaacgctgtactactgtaccatgtcttaaatgggcaaagatgcctctcaagtttgtaaattttgtactggtaatatagtatgtaattctttcattctatacctagtaaaattgttgttgttgagcactaaa

SEQ ID NO: 1521 - DNA, 231 bp, Nicotiana tabacum
ttctgtatactttgctaatttggttcctagagctgtgctaatcatgaatggtatttgcagaaatttggagaagattatcctaggaaaagaaaagctgttattccatttttatattaagttttttaagaagtgattgtgatcatgccaatgttaatggtttctattaatgttattgttatttatggactgtatttggcttaccttgatattagattttgagcttctctaaat

SEQ ID NO: 1522 - DNA, 322 bp, Nicotiana tabacum
agagtaacacattgtgaatgatcagcgattttgccagcgagaagtcggcttttagcgacaaatccttcacttttgccagacgaataaaacagaaaccgaggttaatgatcgcgccgccgcccatgatgacaacatagcttggcagagcgacatacagtggatcgacgccaagtgcggcagcggcttcatgcatcggttttgcggcgttcatcgcaaaggacatcccggcagagaaaatgccgcacatcaccgccagcaccagcccttttttgagattgaactcttcggctttaatgcccatcttgcgctctttcaactgccc

SEQ ID NO: 1523 - DNA, 272 bp, Nicotiana tabacum
tcttccaagcccgtggggactgctgttgttggccctggcgggttggccatcgcaaatccgcgcgccacagccatcgctggtgtacctggtgccgagcaactaatcggcatcggaggcaagaagaaaatctcgctgcaggatgttaactctacgtcactgctcaaatctaaaaacataaatttcgatgaaaagtcagggcgaaacgcagcggggaacgacgccggacgacaaccgcaggggcccccgcaagagttcagtatggtcggaaactc

SEQ ID NO: 1524 - DNA, 343 bp, Nicotiana tabacum
ttttcgataaaaagaaaaatcatgatttaatcacttttgacaccagagaatgggatagaaatgattaacacattggatttagaccttatgtctaaaaagaaaaaggaaccagaggagggggaaataatcaaatataaaagcaaaatatacaaactgattatgaaataaaaaataagtgcattgttacatcaataacaatttttaaacatgggaggggctccagaatcttcttcacgcacgttgacggtggacgaagagaatcaaagatggacagaacaacgaaactttgggatcttagatcatattcaatcatcaaacgtttttcgtttattttgcccacttc

SEQ ID NO: 1525 - DNA, 361 bp, Nicotiana tabacum
ttttcacctaataaaattatttaatcatggtaaattaatacaatttagtataaacacacgatacgaataactttttacgaccaaccattgttatctaatggagtcttacccttttcccatcgtaatgtctaataagcatacatcaatttcaattactgatcttatgtcatatagataaaataatacaacatatcaacaagttctaattataccaagcacttaagagcctcccaacttcaaaagaaagataagcatcaaggcaagcataacatatctgcttagggctaagccaacgctgatcccaagcactcatagtcacactcttgggcttcacaatctctattcccactatttccttcgc

SEQ ID NO: 1526 - DNA, 314 bp, Nicotiana tabacum
ttttcattaaaaatacaaactagagttccattttaaaaaatattctatgttcgatttacatttcgaggtatagtcaatgtataagataccaaaaatttcaactaaaaaatgaaacaaaagaacaaacaattagtaaaaatgcaaaattattcaacgaggtcctaaagaaacagtaaagtcagtaagcggagaaaacttcttagcccaagtctgtgactccaaatacatctgcgaaattcgacccgcaacccgacccatatccggtctgttattcgggttagtctccacacaatccaatccgagatgcaccaatt

SEQ ID NO: 1527 - DNA, 289 bp, Nicotiana tabacum
ttcgggggggggcggcggcggttatggaggtggccgtcgtgaaggtggttacggtggtggctctgaaggaaactggaggagttagattttccgttgcctttagatttatttttttggtttgaaatttatggttctaagtttggttgaagttccgttatggtttactgtggttcctgctactgtcctcgtttttgaccgtgagattgttaccgtgatgttacgttgtggatctgtatttacaaagttctctggaatgaagtgaatgaagatttaccgtttacaattaaaa

SEQ ID NO: 1528 - DNA, 225 bp, Nicotiana tabacum
ttttactttgagaaccacatcttaaccattacacttgcaaaattcaatgttatcgtaccaatacacatgtaagaactacaagatatggtgagctactgaaaagctatcaatacattgcagtaagagacatcacattaacatagcatgaacggccctgcagttgcttcagtgtttgttctggcaccaaatgcacaagaaaaacatcaggacaggtaactacgagtt

SEQ ID NO: 1529 - DNA, 302 bp, Nicotiana tabacum
tttgaagtccataaaatgcttctttataaaaatgccaagttggaatacatactttgaaaactttaagcacatcaatcttttcaatgggcattaagatagaaggttccccaaaatttaacttgctctaacacttgaactatcaaaatcaagctaccactaatagcctctcaactctcaagtgactgtctcaaaggcttcaagcagaaactgctgccttcttccttggagctgcttcagtaccttctctaaaattggtcttgaacctgcgagggacgttacgaagatacctcatgcggccagtt

SEQ ID NO: 1530 - DNA, 275 bp, Nicotiana tabacum
ggcattcgtgactatacttctcatattaatccttacatctgatcttaatgactttggatttggaaatcatctatttgtcgaaaatccaaaattcgaagacccacccatctttgatgaaatcaaggatggttcgaggtttctgtacatataattcaagaagatgtggggagagtacctatgtacatagttggggttctctccttatttgttcttattagctgtgatgatgtgatatgcatctgttcataaataaagatttttttttaccttaaaaa

SEQ ID NO: 1531 - DNA, 363 bp, Nicotiana tabacum
ttttagatgcaaaagaaagatttaatttgtagacttcatttaattcattccataagaactctgtaaacagaaaaacacagtaaagtaacgagccaataacggtcaaaaaagacagtcacacttaacattaagatatacccaacttaaaatgcgatcaaaataactaaaatccacatcttctcaattatctaattcctccagtttccatcagagtcaccaccaccccttgagtagcgtgatccgccatcaccaccgtatccacggtcaccaccgccatatccacggtcacggccaccaccataaccgccgccgccgtaaccaccaccgccgccctcgcgtcttccacctccatatcctccacct

SEQ ID NO: 1532 - DNA, 176 bp, Nicotiana tabacum
ttttgatttaatttgtagacttcatttaattcattccataagaactctgtaaacagaaaaacacagtaaagtaacgagccaataacggtccaaaaaggacagtcacacttaacattaagatatacccaacttaaaatgcgatcaaaataactaaaatccacatcttctcaattatc

SEQ ID NO: 1533 - DNA, 224 bp, Nicotiana tabacum
ttttaatttgtagacttcatttaattcattccataagaactctgtaaacagaaaaacacagtaaagtaacgagccaataacggtcaaaaaagacagtcacacttaacattaagatatacccaacttaaaatgcgatcaaaataactaaaatccacatcttctcaattatctaattcctccagtttccatcagagtcaccaccaccccttgagtagcgtgatccg

SEQ ID NO: 1534 - DNA, 333 bp, Nicotiana tabacum
ttttaatttgtagacttcatttaattcattccataagaactctgtaaacagaaaaacacagtaaagtaacgagccaataacggtcaaaaaagacagtcacacttaacattaagatatacccaacttaaaatgcgatcaaaataactaaaatccacatcttctcaattatctaattcctccagtttccatcagagtcaccaccaccccttgagtagcgtgatccgccatcaccaccgtatccacggtcaccaccgccatatccacggtcacggccaccaccataaccgccgccgccgtaaccacccccgccgcccccccccaaaaagggcgaat

SEQ ID NO: 1535 - DNA, 412 bp, Nicotiana tabacum
ttttagaccaaaagcaaacagcattaaacttaataggctgattatttttccagatcatacagttcaaacaccataaatacaagatattttctagctaggctgagcactgagtcattacatcgaacaagagggcggggcgggggcggatgaaagagcttcgaccccaaactccgatccgtgtaacttttgcatgccatttcttaggtaagcagcttcttatgttttccaggttttcaaagaatttacaaggttactaagctatgacagctcactctatggatgacaggtcatttagccttcatcctctgatttagagtcataatctgagttgtcctcaagctttacctccacttcgaccacctgcactgggactgggaatgtgggtgcacttcctccagtaaaacaggaagaa

SEQ ID NO: 1536 - DNA, 284 bp, Nicotiana tabacum
ttttaatttgtagacttcatttaattcattccataagaactctgtaaacagaaaaacacagtaaagtaacgagccaataacggtcaaaaaagacagtcacacttaacattaagatatacccaacttaaaatgcgatcaaaataactaaaatccacatcttctcaattatctaattcctccagtttccatcagagtcaccaccaccccttgagtagcgtgatccgccatcaccaccgtatccacggtcaccaccgccatatccacggtcacggccaccaccataa

SEQ ID NO: 1537 - DNA, 403 bp, Nicotiana tabacum
cggacagatggcaggagcaataccacaagcggtgactgttacacctgaagagcgtgaggctattgaacgtcttgaagctatggggtttgatcgagctttagtattggaagtatactttgcgtgcaacaaaaatgaggagctggctgcaaactatctattagatcacatgcatgagtttgacgaatgacatggattgaactgggtgctatttgacctgttatagtttccattatacgttgtttttcttctcttcattttaaatgtgtgtgacttccttcctatatatcttgccgtgtggagtacattttatttcctcattcccagtggcaaatcttggatactcggacccttttgtataatggatattatatcagtaaaatcgtgccctaaagttagactaaaa

SEQ ID NO: 1538 - DNA, 271 bp, Nicotiana tabacum
ttttgatcacagcaatacagttcattgataatgttaagtacaattcataataatgttacaacagtgccaagattgacaaagtacttctgaagaaatacattaaagataagaaaagcacttccactgataataagatagtggaacaattgcagacaacgtaagaggtgaagaatgttaaacttaaaatgttattgttccccagtcttcagaaacttgcattctatttagtgtttagttgaataattagcattcacattgcggcatcaaggaa

SEQ ID NO: 1539 - DNA, 405 bp, Nicotiana tabacum
ttttagtctaactttagggcacgattttactgatataatatccattatacaaaagggtccgagtatccaagatttgccactgggaatgaggaaataaaatgtactccacacggcaagatatataggaaggaagtcacacacatttaaaatgaagagaagaaaaacaacgtataatggaaactataacaggtcaaatagcacccagttcaatccatgtcattcgtcaaactcatgcatgtgatctaatagatagtttgcagccagctcctcatttttgttgcacgcaaagtatacttccaatactaaagctcgatcaaaccccatagctttaagacgttcaatagcctcacgctcttcaggtgtaacagtcaccgcttgtggtattgctcctgccatctgcccgag

SEQ ID NO: 1540 - DNA, 304 bp, Nicotiana tabacum
ttttacttacaatagttctgataactttaactagtttctaaagggaataaagaaaaagattaatagatgaggcaagggggaatagaagaaaaaaagcaaggataaaaatgaaacacacatatatatgcagagaatatgtaaagatcaaagagcacaagttggaggattcacaagggattgtgacatacagcaactgacattacttcaactccagcacttggaagtaatggaactagaagctttctgctgggaatccgccgatgctcccaattccattgatggcacgttttggcctccactcagt

SEQ ID NO: 1541 - DNA, 396 bp, Nicotiana tabacum
tttagcagaatccatctcttttatgcttatacattataaacacaccacatacagacatgtcttaagttttacacaactcagcagaattttaataagtgaaataagttcagagagctttgagaaactggatataaatcaaaccaagttggaaacggctggactctaaagcattatacttgtgcttagcggcccatggtctggtcacccgggggaatcataacgaccacttgttgggcgttaaacccgggatgagggagcctacgacgaagctcacggccttcctggcaaagagcacaagggtggcagaagaaatgagttgcaaagtcacaagctgactcacattgctcgcgctgcacctcatcctcaacaagctcccacagcagccgcaagatctgt

SEQ ID NO: 1542 - DNA, 450 bp, Nicotiana tabacum
agggttcttctcatttttccattttttcaaagaagctaaggtttacaaagaaactctccttctgttttcattttcaattttcagatttttagacatagtttaatttcgaaaaaaatacaaaaaaaatagaaagaaaatcagtattctttcttttcctttgcttcgatcactgcataaaagaaaaaactcaaaaacatatgttccgtctcttcttttccaatttcgatttttggttgcaaaaaatggagatggtttccattttgcttgactgaagtttggttgtgtgttcgtcgcaaaattgagtcgaggtgtcgattcgagtttttggggttcatttgcggtcgaattctggttcgtgattcttgctgctgctgttttgcttgttcatttcaaaacttcatcggaaagtcagtttgtaatcacatacaaacaaattcaatcgaaagcttt

SEQ ID NO: 1543 - DNA, 391 bp, Nicotiana tabacum
tggaggtggtaggggctacaatagtggtgatttcaatggaagaagcgagttcaacaagggtggcaatcgtggaggatcatccaaccgtgggggtgatggatatcagcgaactgacaacatgggaggtaacagtgggcggatgaatcatggtggtgggatgcctaatggagctgcgaaaaatatgccaccacgggtttctgctacagcttgaaaagtagtagcttcaggcaaatatgtcagctgaatttagtaaatttttcattttgattcataattaaatggttggatgtcgcataggaagaagttgtcatgagctgtgatatttcataagagctcgttccgcaaattttccttaccctattttttcccgttaattggtataggtaggaat

SEQ ID NO: 1544 - DNA, 468 bp, Nicotiana tabacum
ttttgggcagaataaatattgcctcacaattttgacataaaatttatcacatccccaatggaacgacaaaggaggccggtttattcagagtcgtataagttaaaaattaaaaatggaaaaattaaagaaacaagaacaaaatttctctcacctcctgaagtctcactcctaaagttacatgtgaacaacacattaaagctaactcaaactgtctgtgatctatttccttagacagcaattgtcttgtttgtttaattggtggaagtttagcctgaaaaagccccatccgaattggcaattgccaccagttaactgttgcattcaccgtttgccagcagctttcttagcagggatagcagaatcctcatcatctgactcgacatctccatactcccacattgcaagtcttttctgtcgtgcttctgtttgatacttctccaattcatctagagcctgttgtttgtcctt

SEQ ID NO: 1545 - DNA, 308 bp, Nicotiana tabacum
gcaccgttgctctcattttctgttcactcgtgcagcgggatgcattcctgtggaagtatttatgccaaatgatcaaatggcctgtacttcccatttttcacagggagaaggtccatataaaaagaaagtcatattgataaggtatttcagtccatataaagaggaagtcatattgataatgtatttcagtccatatagagaggaagtcatatggataatgtagttcatgtgcaatatattttaagaccatttctctatagttggctacttcagaacctatcaaaaggagaaaaggctatttcagaagg

SEQ ID NO: 1546 - DNA, 385 bp, Nicotiana tabacum
  misc_feature (295)..(295): n = a, t, c, or g
ctcggattagaaggcgaactagacactgatacttcaggtatatgactggatgcataaacgtgcgctagctgatcgatagtcggctgtgcgcgatatagattactgatatattagactggtaaccttatgccgaagctgaatttggctgatggtggaaacttatattcccgtgttgtgtttatttctttggtttcttctgaacttttagagggtacttgtgtgaaagtaaatggtttcagcttctttgaagacaaaagtacaacattttgtacgtgtgttaagaaatcttctaaantatgtacaaatactaaatttcggaaaaagtaactcaattggttaagtgggttcatatggcattctaaaccatgaagtttaaattccaaaa

SEQ ID NO: 1547 - DNA, 420 bp, Nicotiana tabacum
  misc_feature (406)..(406): n = a, t, c, or g
acccgctccattacttgggtccacgcctggactgtggctgatggggtaattacccaggttcgggagtacttcaacacctcgcttaatgtgacccgttttgggaagaaaacccaatcggattttgaatctataacgcccctgcattgcccctctgtttgggagagtagcctcgctaatcgggtcgggaaatccgttccgggtctagtcctggctctctagataaaagtgcagtttgtgcttggttctagtatgggctgaagttcttttgctgtttggtttggctttctattttggttttaattttgtttaagtttatttgttgttgtggtcgagttaaccaatgatgattgggagtgggagacccttctacttggtctgtttggtttgcaataaaagtgattttctntggttggttaaaaa

SEQ ID NO: 1548 - DNA, 284 bp, Nicotiana tabacum
gaataaaatcgaccgattgtggcaggctataagctgaccaatctgcgaggaggaagactacgagcacttttttgcgaaccgtggtgtcaacctcgaagattgggcaacttttcggccgaagttcctaggcgctatctcctcttgtataaaaaacaaacaaaaaaaagtcattcctttgtattatacttcaatgcgttagtgttataagtttttgtaattaaattatttaatttttataaaaaaaataaaaaaatattaaataaaagttgaataaaaccccaaaa

SEQ ID NO: 1549 - DNA, 390 bp, Nicotiana tabacum
cccatgtactgtgataaaaaccaatgaatattgttgtacaaatgggcctggatcatgtgggcctactgatttgtcgagattttttaaggaaagatgccctgatgcttatagttatccacaggatgatccaaccagtttgtttacgtgtccttctggtactaattacagggttgtcttctgcccttgaaattgaagcctgcaaaattatgactatgtaatttgtagtttcaaatatataagctacacaagtagtactaagcactattaaataaaaaagagagtgacaaagaggagaggctgtgggtcagattctcttgttcgctgttgtcgttgttgtagcattctggttttaagaaataaagaagatatatatctgctaaattattaaaa

SEQ ID NO: 1550 - DNA, 358 bp, Nicotiana tabacum
agaagcttaactttcaattttctgatgacaagaaaatgaagcaagtggttcagcggacaacagaattgaatgaaacaatttgtggagtaagtggagttccaataaccaagaaacgcataacagacgttgaggggttattattacgctccttagagcatattcaagactgtttatcagtctcatgaatcatgttaacatctcaatattcgatcccagtatctaaacataggaatacaatatacagatgtatatattctggacttaattcccagattattccatgagtaatttgtagtaaagtcatatgttttgtaactgtggagtttgattcagataatagacaactatttcaataaaa

SEQ ID NO: 1551 - DNA, 230 bp, Nicotiana tabacum
gttgtatttggaatgagttgtgtgtagttcctgtagctgtgcaatgtagaattttagatgagggtgtacttgtttaatgcttgttgtttcaagattcatagcagataggatggttaagctatagccagcacagaatggtgttagaatgaagctgaaaatttgtgggctttgttgatggtgatgactctatcttatgactgttttaagtctgaagtttttcttggttaaaa

SEQ ID NO: 1552 - DNA, 521 bp, Nicotiana tabacum
  misc_feature (74)..(74): n = a, t, c, or g
tccaacgcgttgggagctctcccatatggtcgtacctgcaggcggccgcgtaattcactagtgatttaatacgnactcactatagggaacaaaagctggagctccaccgcggtggcggctgctctagaactagtggatcccccgggctgcaggaattcggcacgatgggtttcctttctttttattcttcaaagactatggtgaagtttgctcacgtcgttgctttcttgcttcttgcttcactctttcaacccctcactgctcgagatttggaaatcaatgtcttgcaacttgatgtgtctcagtctggttgccctggagtgacaaaggaaagatggccagaacttcttggaacaccagcaaagtttgctatgcaaataattcagaaggaaaatccaaaactaactaatgttcaaacagtacttaatggtactcctgtgacagaagatttaagatgtaatcgagttcgtcttttcgttaatgtattggactttgttgtacaaactccccaggttggctaa

SEQ ID NO: 1553 - DNA, 377 bp, Nicotiana tabacum
ttttggaatttaaacttcatggcttagaatgccatatgaacccacttaaccaattgagttactttttccgaaatttagtatttgtacatatttagaagatttcttaacacacgtacaaaatgttgtacttttgtcttcaaagaagctgaaaccatttactttcacacaagtaccctctaaaagttcagaagaaaccaaagaaataaacacaacacgggaatataagtttccaccatcagccaaattcagcttcggcataaggttaccagtctaatatatcagtaatctatatcgcgcacagccgactatcgatcagctagcgcacgtttatgcatccagtcatatacctgaagtatcagtgtctagttcgccttcta

SEQ ID NO: 1554 - DNA, 297 bp, Nicotiana tabacum
gttgacactgagaaaggtggccttgctataaacccgagatttttcgttgattttggagcagaacctgatggtccatccttggctcatgaaatgaggtatcctggtggtgactgcacttctgatatttggatataaagtggctaaaaaactgatcaagaataaagtctggtgactctggtcccatgttgttagtttgcctactgaatatccaaatgtattctattagtgaaacaaatgtctgtactgtaccttaaaacaacacttcaataattttagcttgcacttgtccttttaaaa

SEQ ID NO: 1555 - DNA, 279 bp, Nicotiana tabacum
tttaaccaaaaagaatttgctaccatcttaggtatatgtgttgattcttcaatcaatccatataaatcacacatatcgaagctgctatataagtttgcagtataaaatttaacttcagacaactgatttaatggtaaaaaatgcatcaaaaccaggaacacataaccggtcaagcccctactctttttaacacttgacctccttgagtccatgtgcgaggtacaaaaaggtaggatcagtggcgccatccttgtagtaggcaaacaccattccagtatc

SEQ ID NO: 1556 - DNA, 355 bp, Nicotiana tabacum
ttttgctcactcctaaaacaccacaatatataagatataaaaactacaagatggctaatctctttttctccatttaactgggcaaaagtgcaaatatttgatttcaccgacaaaattgtaaataatgtctcacgcagacaacaatatcagataagaagaaactacaaactaaagattcaattaagattccagctcctcaatcttcctcctcagcctcattctcagcaatgttgaagtacctcagctcatagacattgcgatccttgtttgcagaaataactctgagccaatcacggacattgttcttcttgagatacttcttggtcaggtagttcagataccgcttggagaaagt

SEQ ID NO: 1557 - DNA, 346 bp, Nicotiana tabacum
ttttgtagccaaaatctgcaaaaacatgcacttcaaaaatagtaacttcaaatggagcaaagtgttgataattattggtgttaggaaaaataaatacgtcagaaaattgggagatgacgggagatcaaaagggattccgccattgaagcctccaaatcagctacaactgaacaaaaagcagaagggaaatgcaaccttatcatttcttctttccatctatgtttgagctctattcatatgttgagaagttccgtccctatttaatttctgcagaatccagatgtgaggccggcgccaaactctgtagcagcattcacccccatctgagtatagcagaaccccacgt

SEQ ID NO: 1558 - DNA, 348 bp, Nicotiana tabacum
cttacgtggggttctgctatactcagatgggggtgaatgctgctacagagtttggcgccggcctcacatctggattctgcagaaattaaatagggacggaacttctcaacatatgaatagagctcaaacatagatggaaagaagaaatgataaggttgcatttcccttctgctttttgttcagttgtagctgatttggaggcttcaatggcggaatcccttttgatctcccgtcatctctcaattttctgacgtatttatttttcctaacaccaataattatcaacattttgctccatttgaagttactatttttgaagtgcatgtttttgcagattttggctacaaa

SEQ ID NO: 1559 - DNA, 408 bp, Nicotiana tabacum
ctactgggctaaccctgttgcatggaccttgtatggtttggttgcatcacaattcggagacatccaaacgacactatctgataatgaaactgtggaacaattcttgagacgttactttgggtttaagcatgattttcttggagttgttgcagctgtgctcactgcatatgtctttgtgtttgcctttacatttgcttttgccatcaaggcgttcaatttccagagaagataagtgaatttaatcgactgaagagctttgaggaagcagtggttacaaaattagtatgtataggttactatttgagaaagtcttttcttttcaacttctgaatactaggtgtatgttcttgtaatattcattggaaatccaaactttatttattaacatatcagcagttttgttccaaa

SEQ ID NO: 1560 - DNA, 437 bp, Nicotiana tabacum
tttacgtctaacatgagctgtagttgacagttctcattattcataatggtagaattgtgtgttgctatttctacagcaaatgacttcatctaacataaatcttatgatttcaggaataagtgcgatggggactcaagtccaaatttcttggtaggtgtaaaaaaacttatgatctggctttttccacgtcttcctccgagatctttgacgacattaccttctttggttgacgagccatgtcataagttgcatggaggccaaaaagaatataatacatcagcattacagccgtacatatgccaaaccttataaatgcctgagctcctaatgatcccatgagaaacaagtttattgcaattgagagggatgggaaccatggaaccagtgggactccccaaacttttggtgttctttcctgtggcaaaagaactgatatt

SEQ ID NO: 1561 - DNA, 374 bp, Nicotiana tabacum
ttttccagataaatacacaacaagactgcagtataattctgttaaaatccaataggcaactatcaagatcaactgaagcgaacagaatgtgaaaaatatgaagttggtgcagaagtaaactggaaatgataaagttcctccgtgatagaatgactattgaaccaaagaaaaattcaccaatctttaccaagatactttaacctaacagaactgaaagaacagatacgacatagtacaattgtccggtatgctaaccattgccaaccgacatgcaattgcactaaataacaggggattatttctgattaatatgcatcttaatagactccaaaacgcttagtcaaaatggccaacatgttacattgtctatttta

SEQ ID NO: 1562 - DNA, 279 bp, Nicotiana tabacum
ttttgttgtgaattgtagattaaaaaaaacatggaactacaccattattggagaccaaataaaaattcatagataatctccagtacatacaatagctagctttacagggttatcaaacaatcagatactagaagagactcctcattgagtcattattggagattaaaatgaaccaactttgaaaaataaaaggggcgatcttcacatgtcaatccactaggaaattattccatccaagaattaacatacttcaccatcactactgtttcaaagaatcaa

SEQ ID NO: 1563 - DNA, 316 bp, Nicotiana tabacum
tgaatgctgctacagagtttggcgccggcctcacatctggattctgcagaaattaaatagggacggaacttctcaacatatgaatagagctcaaacatagatggaaagaagaaatgataaggttgcatttcccttctgctttttgttcagttgtagctgatttggaggcttcaatggcggaatcccttttgatctcccgtcatctctcaattttctgatgtatttatttttcctaacaccaataattatcaacattttgctccatttgaagttactatttttgaagtgcatgtttttgcagattttggctacaaaa

SEQ ID NO: 1564 - DNA, 346 bp, Nicotiana tabacum
ttttgtcaaaaatatcaagtaaattaaagtcactaagcagttatcttagttacacccgaaacatgattccaacaagcaataaaagaaaaacaaactcaaaaaacctatgacaatagattctggtactatggcttcaaaaaaaactgaagaaaaggatcttaaggaaagtcaggggaagcttaatgtcctggaagtgccagaaatacctctcaagccgctgtctgtcatctcagattctcgatgaagctactcatttctgagaacattccaaaaccaaactccatagttcattgatgctgtagttaaaacgtaagcgaaattcagcttagttagttttcttttcgtc

SEQ ID NO: 1565 - DNA, 391 bp, Nicotiana tabacum
ttttaatccgtgtaaacattaatctcgggcaatattcattatcaacactagatccaaaaacaaaacaatcatgtaatccataataaactagcatgtggatctataaatagctgaaaagtctacaatttaaccaaggaaaatatctgcgtaaggctgtgtttcaatttacgcttatttcgtttcatggcagcgaggactacaaattcaagcatacactgtccaaatagatcctatttggaataaaaagggtagctccaaatctcgcaacaatatgctgaaaactcagatctctatttcagtttgtgaaagctcaaggcatgtcaattacctaacaaatgatctcactccacagagatggagtccaacaatcttttaccttcttcgctcagct

SEQ ID NO: 1566 - DNA, 471 bp, Nicotiana tabacum
ttttcaaatgaaatgctcattctttattgctcaaaaaatgtacagatgataataacttgaaagagaatattgggtcttataacttaaaaacaaatccaatccttctccttattaaaagtagcttatttgctatgctgcttctagtgctcaacaacaacaattttactaggtatagaatgaaagaattacatactatattaccagtacaaaatttacaaacttgagaggcatctttgcccatttaagacatggtacagtagtacagcgttgcgtcaactggacctcgacgatgtagcctccatgtatgtagttgtgtacagaaccagctcggaaaacatgtacaatgagcaagttcccaacttttgaacagtggttatctgtggctactgctcctttctttcctatcttccaaaggattcgttctcgccaatgaacgagcagtgaaacctacgcattggtgaggcccatcga

SEQ ID NO: 1567 - DNA, 312 bp, Nicotiana tabacum
ttttaaacaggaaagacgatgcacatattcaaagatcaaagtaccagcgtttacaccagattataaattgacaaggctacattcagtattaaatttgctcacacgatgcaaattaagcaaactccaagggttaaacactaacagctaaagggatcatcatcaaaagtttcctgatcagtgcaggtaaggagcctggtaatggtagccatttccaaagaagtcatagccaggagaaaagttgtaaacagcagcacccatgaataaaggaacatgggtgctggtcggtccagggtgagcatatggtctgtcata

SEQ ID NO: 1568 - DNA, 427 bp, Nicotiana tabacum
ttttaataccaagccattagtttctcattatgaaaaactttacaaagacaaaattacacagaactacaagccaaaaaagctcaacatagtaactttgatcaaatgatcatataatatttgcagccttggacacacctcagcaacagaatggaacatcaacaacactaagaagttgcacacctaaatccaaaacaaaaagactcgactccgtagcagaaagtagggtttacatgaaaatgtatgatggttagcaacactgaaactgtctaacaagtagaattcacactctcaagacaagcatatctctgtcgttagccgtttggttttatgcaaaaaaaataaatggagcagtacattatcatacaaaccgccttctgaagtttcgcgtagttgtctggtaggtgcggactaacagaccaactcctat

SEQ ID NO: 1569 - DNA, 332 bp, Nicotiana tabacum
ttttatgccaaagatccaaatgacccattgtataaaatttaccaaaaaatgtactactttcacctttttaaggaccttcaactacactgagtataactcccaagcaagtcatatgagcaaactatgaaccaagaaaatggctaaatttgcaaatccctaaaaggtgtcatgaaatgcaaattttgctgaaaactaactatgtttccttcaactgacctttttttggataacctctgaattctatgaaagtttctatacaaaagctgtatgactaacaatggagtaatgacttcagtagaggattgatgtaccggcgatttaggcggtagctg

SEQ ID NO: 1570 - DNA, 441 bp, Nicotiana tabacum
tttttagatacaagctttcatcattactgtccaactgccaaatggctttctaatttacataatcagagaaaaagaaaagcaaagaaaggaagatagatacctaaaagaattcctaagatgaaaactaaaagcaaagtcaagatagtgagagctaaattgttttttctttttcttttctgggcattcaacctattctcttatcttcttgcttcgcttctgtaagacatgaagataagatttatatactggcagtggaatgcaaccatctgctgcaaatggtatgataaacaggcatcatctgtttggagcaaaagaaagagccaactccacatcatggaaattgcatctatcctaatccggcactttgctgaaaagggctaaaaccatgtagttgtctaattccaatatttgaagtttatcatccactgcaacaatcacaaa

SEQ ID NO: 1571 - DNA, 250 bp, Nicotiana tabacum
actactcacatcatgccattttgatgtggggctgattttttattgttgataactttggggggttctttggaggttttgtaaatcataagcaattttgttgagaaaaaaaaaaatatagaattgaaaaaagaagaaacttcaattgttttcaagtttcaactctagactagctagtgtttcttagttcttgatttgatacctctttccctgcaaaatcatttttatagattactactttgatcacacaaaa

SEQ ID NO: 1572 - DNA, 469 bp, Nicotiana tabacum
gtgggtgacagatatgaagctggagggccagcccgagaaggaagaagctacagagatagagcaggaccctatgaccgccctcaaaggggaggacgcccaccttcctttgaccgttattgaagtgccatctatgtagaagatgttgagttttagttggtctctgccgcagtttggtggtatggagtacagtagggtaactgtatgccgtcttgtttggaagcagctagtagttactatgcatgaatactgacgagtagagtaaattagtagaaaacgtcgcagcgttatgtttattttagtgaaacagattggacgtctttagtgtcttttggttttgtttttatgcttttgtagaagagggagccttcctctattggaacgcattatggtaccctgtgtgccatttccacttattgctcaaatcatactctctcatcgtgaataacaaggttgtcctttgtaatcaaaa

SEQ ID NO: 1573 - DNA, 451 bp, Nicotiana tabacum
ttttgagaaaccgaaacatataccgaatttatttcagtatgttagtataacatttttaaaaacgaaaatacagaaaccgaaatctttcaaaaccgtaccaaactgaccgatgaacaccaccaccaccccgccaaatttctcctctaggctgcagcaaagtttagagttgacataaccaaactataaacgaccagaattagagctccccaaaatgctctttcttaagtgaaaaggaaaaggggaccaggtgaagggagaaacatagaaacagtatctggcacctcacgtccggcatgtattggatcataccaaaaaaacagtgccagttcagtcagacagatatgccataattgcttatcttcgtaacttccttggtgagaacattcctttccttttttgcctctgaagcaaggttggaaacttgtgaccggaatcgtgaaacttctcttcg

SEQ ID NO: 1574 - DNA, 295 bp, Nicotiana tabacum
gcggtagggtgaggaagaatggcgttgaaaagtcagcagaagaacttgataaagagctggaaaagtatcatgctaccgcagatgctatgcagacctaatgacggtgtgtactttcaggccttgtggcataagcaaaagaattggaagaacatttgttgtaaagagtttcccgaatgttttagtgatttttctgatatctgatagatttggaggttactggttttggtttaatggtttgtaacatgactattggaatgtcaatgctgtagtatatgactatatagttgcgttaaaa

SEQ ID NO: 1575 - DNA, 310 bp, Nicotiana tabacum
tggaggcggtcattatggaggcaagtttaagcatggcaagcatgggaaattcaagcacggaaagcatggcaagtttaagcatggcaagggcgggatgttcggaggcaaattcaagaagtggaagtaaactagtgtctacttataatatcaacttcacctggctttttacattgtgtgctaatactgcgtctctttaaataagacatagacatactacatgttataattgacctataggcctgtgagatgttctcttgtaatattacattttcaatgctaaattgtgtgagagtctgcagttggattaaaa

SEQ ID NO: 1576 - DNA, 266 bp, Nicotiana tabacum
gatatgcctggtggtgcacagagagtccaatgtgcacagcagtaattgggtatgcttcaagaaattaacagggcctactctcccctggtaaaaaccatgacattgtcaggaatgttgctatctgtggtaggaggtagattactagtaaaggagttgggaatctttattatgcaaactaacactataagcagaatcttactgcttgacaattgcaagtgtgcttacatgttattcgcaatttgttagttattttattcaatcgaaaa

SEQ ID NO: 1577 - DNA, 321 bp, Nicotiana tabacum
atggatattatggtggtggttataaacgtagaggatgccgctatggttgctgcaggaaaggttacaaaggatgcaaaaggtgttgtgcctacgcaggtgaggccatggataaagtcactgaagctcagcctcacaactgatcattatgtgtaatatataaagagtgtaagttatatatgccgttagcgtatataacttatacattgtgctactttagaccttgcttgtaacaagtatgaataaagccattcggttcttagggatggttggtcatgtaatgttttgttgtacaatatattgtgataatatgtttccataaaa

SEQ ID NO: 1578 - DNA, 355 bp, Nicotiana tabacum
  misc_feature (325)..(325): n = a, t, c, or g
gacgtcgatggagacgacggtgatcaggacggagaagacggcgccgttgaaatgtggtttgagaattgggaaaatttattgaaaatgagaaatggggaaatgggttggtatagatgccaggacatgaaagtaattgacggcaacgtagttaggttgtgggacggttgtagacggcggaggaaggcggaaaccaccgctttctcagttggcgtaggtagtacttggtagatttatagaaaagaatcaatggtagtaggttactatagcctataggtgtatttagttgggaattgcaatatatgaaaactaaagttgtacatttgtnctagtcaaaatgttcgtaatacttcaaaaa

SEQ ID NO: 1579 - DNA, 253 bp, Nicotiana tabacum
gagcgtgaaggggaagacactggagcagaggataaaggagaaggagataaagaaggcgtacaaggagaggatgaatgagctcaaggaagagataaggcagaacaaggttgacagaggaagaagagggaggaaagagacagaggaagcaggaaaacattctcagtccgggacaaggttcagaagatcaccaatccaaagacgcttaaaaagattgcaaatctaagcaaaggaaacactcaggttgtttctgacg

SEQ ID NO: 1580 - DNA, 388 bp, Nicotiana tabacum
ggaatgtcgtttggtttagttaacacagggcatcctttagcccagttgctctattgctttgactggaaactccctgacaaggttaatgcaaatgattttcgcactactgaaacaagtagagtttttgcagcaagcaaagatgacctctacttgattcccacaaatcacagggagcaagaatagcttaatttaatggagttcttggaagaattaaagaagaagggctatataggtgagattttttgtatggttgcaaggtttttagttcatacaataagacaatacattatattccagtattgtgtatcatgtataataaggttccttttgtttattattagacacaataattaatctaattttgaccaatcaaaaaaaaaaaaaaaaa

SEQ ID NO: 1581 - DNA, 366 bp, Nicotiana tabacum
tgggatgtacccagacttggagaaatccactagctttactatcattcagggtgttgctcccatgaagagctttgaggaattcggagagaaagcagcagaaggaggaaatgggtgcaagtgtggatcaaactgcacctgtgacccttgcaactgttaagaatattctcactacaaaaactgcattgtgtctctgtattaagtgtgtgttctaaaagttattgtaattataacaataaaactacaaccatggaacagatatgatcagttcttaggtttgtgtgttactcgtgtgacgtggcttttctgtttgttaattgggttgtgtatcaatatactacataagtttgtttgtttgtttgtttaaaa

SEQ ID NO: 1582 - DNA, 302 bp, Nicotiana tabacum
ttttacacataataaaaagaggagatatatattgataagttcgtgttacagcccaaatcagcttcctttcatacaaatatcagattagaaaaccaaacagagaaaccatgaaacaacatcaaacaaaccttgtcaaaaagatttggagatgctcagtttcatggttgtagtcttattaatactacaaagcttttaaacacatatatttttgggtcagctagtgaccatgttcatcagcagttgcaagggtcacatttgcagtttgctccacacttgccagccatttcctccttctgttgcct

SEQ ID NO: 1583 - DNA, 353 bp, Nicotiana tabacum
gaaggaaagggtaatgaacgctgcaccatatggcctcagcaagaaatcgggtgagtgctccacccccgagtctaacggagttggtttctctgcaacttccagtgttggtactagtcctctgatagcaggtaaggagacctagctacgacgtctgaaggcagcctattgccataaaccattgaagcataatctatttttattaagcaagttaaaagctgtagctatcaagttttgctgttttaattgtaatatcaacttggttagctttagccagacttcctagtatccaatttgttttgtcttttgctgtacttaattctctttcatctgaacctgatggaattctcccaaaa

SEQ ID NO: 1584 - DNA, 334 bp, Nicotiana tabacum
ttcaaacctcaagctaaaaaatggttttgctgcatgcaaagcccccatgcagaatcctgacaaggttatctatctgcccgcgtcgaatattgaattcatattcataacaaactccagaactccctttgtgttggcgctggagacagaggaattgctcaagtcactttttgtcttgtaaacttgtgatagtggggagaatatgaaaaacgatatgtttgatgtacctatgtgatgtatttgtattttacatttagcagacaagttttcgattgctttcatatacgtgtggttagcacatctcaactattattattctgataatttcatcacaaaa

SEQ ID NO: 1585 - DNA, 305 bp, Nicotiana tabacum
ttttaggaaaagtagaaatcttattgcatataagcattggtaatttacaattacatttttccctcggcaacccgattataagttacattttttagctactctgaggagactacgcttgagtttcataacaatgaaaagtcctcagttctccaaaattcctaatacaatgcatactaaagatcctattggtgtataacctttttgatgtctcaattcttatactcttatgaataatacataacaattgccacgaaattttctgaaagaataggtggcttaaggcaatatttacaagcctttttacc

SEQ ID NO: 1586 - DNA, 404 bp, Nicotiana tabacum
tatacacaatggcggtttcaagaaagaagtgcctaatttgcaggaggttgttgtaatggagggagctggtcacttcatcaaccaagaaaagcctgacgaaataagttcccacatttatgattttattcagaggttttaatcaacagagtccctctttgtctttcaggttactgcgacttcatcacttggaataagcaatgacacagtatacactgtaatgttaccacttgaatgtatctatgattgatactgcattttacctttctacaaattactggagttcttggcagaatttgaggtgtacttgttgatgtttgtgacaaaacaagatacccaatcagataatgtgcctgaaattgaaaacttgattgatgggaaagatggtatttgcctctctgttaaaa

SEQ ID NO: 1587 - DNA, 368 bp, Nicotiana tabacum
tttttaagtgttagtgtcacaaaaattctataaaaatgaatatagtacatagactacatctactgtgcatatgatgcaggattgctataataatgttacaaacaaaataattaagaatcaaagaatggataggaaatatccataccaacacaggaaagaagtggaaaaagaaacagaacactagcatagtacctattcagatttcctgtccatctttgtcgacaacttcctcttcattctgctaaaaggcccaaccgtccggtccattatatacatgtagataacctggctccaagatttgtaagattctaagttttcgtagtattccggtgcaatctccttcaccttgaagagcttgcttccagaaa

SEQ ID NO: 1588 - DNA, 424 bp, Nicotiana tabacum
ttttaatgataaggccactactcattaacatagaagtaaaaatgatcagaaatgtgcagctgcggaatttgaaagagcggttgtatcagcccccatattacacaattgcacgacgatactggaagtcggactaaccaattttatactattctgacatctgctatgaagataaaatgctgataaaattgctccttttaagactatacacaaagacaagcctactctcgggctccatctcaaaagaataccaaagtttatcaaaaagaaaaaaaaaagaatgtaatcaaaccagacctctgtgtgctctggcgatcgactatattacggctgtcaagccccccctgaaactcttggcaacctcaatcactataatctccggactctgaagagtccgactcttgatcctcattgacatccccatccc

SEQ ID NO: 1589 - DNA, 227 bp, Nicotiana tabacum
gcaacaaggaaaagaaactcggagcagaggagaaggaggaagcttaatactctgttaagatattttcgatacaagttgttttatagccaaatacagctaagtaattcattaagatggcgtaccatgtcgtataagctttcaacacatcattcatttccagagtttgtattataggaccatattgatttctcaaagacatcaatactaatttgccaaatgtattaaaa

SEQ ID NO: 1590 - DNA, 314 bp, Nicotiana tabacum
gggcgacgaatttgacctctggttgggtgaatagctagctagctttgcctggttatcattcataccaacttctttgatttgtcctcgttcatacgccagaagtatcatctgcccatcaacttttacattcttgctaggacttaggagtatcttgtatgagctagcttccccttgttatcctcttgctttgtacttgttttgttaggacatttttgtacaggcaatgacctaacaaaatggagtattaactgctcaatgtacattaattctgtgtacctaatgaacatcaaggagtggaagtgtaacaactaaaa

SEQ ID NO: 1591 - DNA, 291 bp, Nicotiana tabacum
tgggtgaatagctagctagctttgcctggttatcattcataccaacttctttgatttgtcctcgttcatacgccagaagtatcatctgcccatcaacttttacattcttgctaggacttaggagtatcttgtatgagctagcttccccttgttatcctcttactttgtacttgttttgttaggacatttttgtacaggcaatgacctaacaaaatggagtattaactgctcaatgtacattaattctgtgtacctaatgaacatcaaggagtggaagtgtaacaactaaaa

SEQ ID NO: 1592 - DNA, 246 bp, Nicotiana tabacum
cagcaacaaggaaaagaaactcggagcagaggagaaggaggaagcttaatactctgttaagatattttcgatacaagttgttttatagccaaatacagctaagtaattcattaagatggcgtaccatgtcgtataagctttcaacacatcattcatttccagagtttgtattatagggccatattgatttctcaaagacatcaatactaatttgccaaatgtattaagcttccgtttcagttaaaa

SEQ ID NO: 1593 - DNA, 489 bp, Nicotiana tabacum
ttttaaggagaaaaatcctttggaacataggaacaaaaatacagattattcaacattaaatattttgagaaagaaaataaaggacaactgccaaaacctctttcctcattctctttcctcaagtataatgaactattgtgccttactatcacattttgacaagaaaaaatgaaaaataaggaacagtatcttatggtggattctgtaacatgctaagatgtatatatggatgaatgatgcatctgtgaactaatccaacatatctcctcctcccatcactcaaagggtggaatactttgagatcaatttgtcaacatgaattactatatcatctatgcgaggtcggactgtcgcttgtggctgaagcatccatgtcacaaactggtgaagggcgtccggatatgaagtattaggctcagttggccactttatttgtgcatttacaatagccaactgcggacttccatcagattcctcaaatgcatactc

SEQ ID NO: 1594 - DNA, 543 bp, Nicotiana tabacum
gaaaatgataacatcaaagcagttattcttgttctcgttgtgctactggtggttacggtcatgcagtctcttaaagaggagccctcaagagaccacgtagatcatccaagtagttctgcatctccatcagaagcacttcgctctggagacaaagaagacaagatagactaaaattttcactttggtgaacgtcaatcccaatctgaccgagataagttgcttgagaaatctttgaaaagatgagcaatcgacatggcagtcactgagtggttcaaccatgttggtaaccataatcatcgtaagccagtatacgagcaactatagttgtaagattgcttctagcgttttctgcatccagtgataggaaatgaatactcagtgcaaggatttgttgacagtaacggttctgaaaatggagacaaattttgtttcgttctgtgtaaatgagttcaagacgaaaaacaaaaatgctgcgagttctatttcgcagcttgtccactgttataataagaatatttatttagaagctataatagatcaagc

SEQ ID NO: 1595 - DNA, 447 bp, Nicotiana tabacum
ttttcacaaataaaaacttaacaatctttattaattatcaacactagtggaggactatagtcttccttattcctttagtgatacagactataacagtgaaatgatcccaccaatactaactacagatagtagtactagtaattctagagcttatgaaatgtaactttcaaaagttgatcagatctagaaccaataaacaaaacccttttgctaccttcaacaagtattccaatttctccacagaatggtctgcatgtctcacaaactccaggacaatacacaagtttgtaagcatcctcgtacttgtcaatcctaaaccaattgctcaatgtttcacgcccaggatttccttctactccaccaactgtcaccaaataacgctgcggaattaattcagtgttaattctccatactgtagacgaatcagagatatgaatagacgtaaat

SEQ ID NO: 1596 - DNA, 316 bp, Nicotiana tabacum
actagttcttcccacaacagggttacccaccacaggggtaccctcaacaaggttaccctcctcaagggtaccctccccagtatggtgctccaccccctcaacaacaacagcaacaatctggtagcactggcttcatggaaggatgtttggctgcactgtgctgttgctgtctcctagatgcatgcttctgatgatgggttggcggcagaaattgatgcaaccagtatggttttgtgaggcggcctcatctatatggattattaatctagatttttttttctttcttctgttttgtccttgctgtcttgtcctcgat

SEQ ID NO: 1597 - DNA, 246 bp, Nicotiana tabacum
ttttgaagcgcaagagttaacaggtatgcaattgtagactgtaaatctaaattcacttaattccagataacttcgtaaatacagatccacaaaggtaacatcacggtaacaatctcgcggtcaaaaacgaggacagtaacaggaacaacagtaaaccataacggaacttcaacaaaacttagaaccataaatttcaaccaaaagatctgaaggcaacggaaaatttaactcctccagcttccttca

SEQ ID NO: 1598 - DNA, 405 bp, Nicotiana tabacum
cgcgaggatattcttcaggaactcggttgcgactggtgaagtttatccgcttgaatcggaagtgaggatttgtgaggagtgtaagacgggtgatgtggtgactgttgaactaggagagagtaggttgattaatcatacgactgggaaagagtataaattgaagccaattggtgatgctggtcctgtcattgaagctggtggcatttttgcttatgcaagaaaggctggaatgattccttcccgagatgcttagtttttcaaagtggtaattgattcggttcaaatattttcttttaaagttttgtattggtgaaaacaaatgattgcataataaatatggtgtttgttgtatgatttggagaaaaaatcagcacctttaaaaaggtgtcttgtgttctgttaaaa

SEQ ID NO: 1599 - DNA, 455 bp, Nicotiana tabacum
ttttgactaggcaattaatagatgtcaatattgaactaatcaatacatctactccaagtaacagaattatcctcaggtatttattatcaacagatttacagtgaatcaacaccaacaattaagtcatgcatttttttatcaacaacggatctcttccccaactaacttccaagtttggcgcctatccttttaagttgcaggatcatccatcagctaaggccattgaataccataatagcgagacaccgatttagaataaatagctcttcacatgctctttgatttatctacaatcccgtttagactactgtttttacatctagcggtcataaggaaattccatgtcgttctctgttactttgaatggttgaggatgttggccagagcaatagagattccacatcttaaaataagatctctccagattccgtacccagcgtcctgtgtcaaacaga

SEQ ID NO: 1600 - DNA, 374 bp, Nicotiana tabacum
ttttgaggtatcacaatatagtgaggacacttctgtaaagaacagaatacacaagtacaatatctcatattggagatttaacaaaatacacaagtacaatctcttgtattggagatttaacagagtacacaaggatactctcttagtttcatgaccaatttttatttactgtaagttatcctctacctacttaagagcttgatctgagttaacatgcatctaacatccttactgttaggcctctcctttggattatccagggtgcgaaagcaggcaatcttgagaaccaaaagcatttgctcctcatacccattacccatcagctttggatcaattgctctttttggattctcagacgtcctgacatttctcat

SEQ ID NO: 1601 - DNA, 350 bp, Nicotiana tabacum
ttttgagaagtcagttaatttgccacactaaaaaagtacaaacgtcatattcaatagagttcattttcaacacaataagaaaggtaatgtacagagcaaaccatatgctatctagcccaccaagaaggaatagaattgttgatcaatgtgctagcacttgtggttgactctaattttgtaatctcctcaactgctttcataacttcaacagaatctgtttctagcacttgaccacctaaaattatttcatctaaaatggtatgcatcttgctataattgaatactacatcaagttcgcatacacttctgaagcatttgtccagtgtttccaccaaaaacttgtattagat

SEQ ID NO: 1602 - DNA, 247 bp, Nicotiana tabacum
caattgaatattcgctataactaggtctatttacagataacaagtaaaaaaattcacccacccaataagaaaaggaagaaactaaagaaaaatattacatcaattgtctacaaaattcctgaatcccatcttcaagtaaccaaatcaaaagtctcaccattccccgaataattcaaattttggaggcagagatagccgcgatttcttcgccggatgaggactctccacttcatcctcgccgaaacca

SEQ ID NO: 1603 - DNA, 389 bp, Nicotiana tabacum
ttccgcggtggacgtcgtgaaggaggcggcggatacggaggtggaggatatggaggtggaagacgcgagggcggcggtggtggttacggcggcggcggttatggtggtggccgtgaccgtggatatggcggtggtgaccgtggatacggtggtgatggcggatcacgctactcaaggggtggtggtgactctgatggaaactggaggaattagataattgagaagatgtggattttagttattttgatcgcattttaagttgggtatatcttaatgttaagtgtgactgtcttttttgaccgttattggctcgttactttactgtgtttttctgtttacagagttcttatggaatgaattaaatgaagtctacaaattaaatctttaaa

SEQ ID NO: 1604 - DNA, 408 bp, Nicotiana tabacum
gtttttcaaggcaattgaagccagtgctgaggagtacatggaaacttacaaggctgacttggacaagagacgggaggagaagcaacagttagaggaaagacgtagaagggagaatatggaaaatttgagaaaagatatggagaaaaccggaggacaaactgtagtactgagcactggtttgaaggatggagaagataaggggaaggctatgatggacgccgaggatgaagaggaagaagaagatgatgacatccagatttttagtgaggatgacgatggtgacatagacgaggacgaagatgaagaagttgctggctttccattttaagattgtacatggtgtcttttgagaaacacaaccctgtataggactgatcaaagtgctaaacccaaaattgagggacacaa

SEQ ID NO: 1605 - DNA, 391 bp, Nicotiana tabacum
ttttgaccaacaacacaagtcaatatctttcaacccaagaagccatgtacacagtatatgtattacatcataaaccaaatgtaatagcagacaaaatgggacaagaccttcaaatctaaacagttataacaaacatgccaactggctccaagaaaaacttgaagtatcatcacttgcttatgcattatcatccggtgtcttcggttcctctcttggtttcaaagacgccgaaggcgatggagcaccatcttgacccatttcagctctcaaatcgttgatgctttgttcaagttcatcgattcggtttcccatctcgtcaattttcgagatgattgattcagacattgtctgaaatctggtttgcatttgctgaagaagattctggacaaac

SEQ ID NO: 1606 - DNA, 421 bp, Nicotiana tabacum
gaagggccaaggatgtgaatgaaaccttcagatccgaccttcatctccttcatcctctgtcttcttctggaaaatccagcgttttttttctttctttgttactgctgaatcgaacgcataccagtttaatcatttgagttctccggcgagtcacgagttttccgattgagcctcgactactatttctattggttcttcatcgaaggtcgttcgaggttgacgcatcgaggtctccggtgctggttctctcgccgggagggtatgtgcccttggtcagtcttttgcctttgtgtcatgttcagaagtattactcttcatgtttgatgaatcgtttgattaatattcttgtctggattgcatcgtagtgatttctgaaattctgtttaattttgtgtcatattgtattatgttatgttcaaaa

SEQ ID NO: 1607 - DNA, 374 bp, Nicotiana tabacum
gtcccgaccaatatttggagttccctccacaggggttttagtgcataaacgccatggaatgtgcagtctcacactctgatgctggtattagtgatgctacccttatcaatatcaatattcatgtcctgtctgtaaatagtgatttgatgctggtattagtgaagtttaccgttattggtatcaagattcatgtcctggttgtaattgttgctctgttggcataatggcttctctgtaaatacagctgaaaagcacacatatattgtctggaatatattgagagcacatttctcattgtaagcaaatggtaaagtccttccttatgtaggattttggttcttttccaggaataaaaataagagtcaaacccaaaa

SEQ ID NO: 1608 - DNA, 447 bp, Nicotiana tabacum
ttttcaaacatacaaccaatgtaatgactacaaacactaataaatgaaacagcctatccagaattctgtactgaagcacacaagattcacgaaagcttaacaaaaaaattacaactttagaagtaacacatcttgattcatagaagtaacacaactttggaagtaacacatctggatatcccattagcagaaatgaaagttccacatctttaccatgtgggggaaagatcagtcattcttggtaaggacccaaatagcatagataataccaggcagccatccaaagagagtcagcaaacaacagatccagaattcacacttgcagccaaatttgagaaagacaccaaggggaggcaaggtgatggccaaaagaatgtctatgcaagtcatcgcacccatcttttttattattcaatagaaattacagagggaaagaagaaaggacaa

SEQ ID NO: 1609 - DNA, 397 bp, Nicotiana tabacum
ttgtttaacattgtcttcttcttcattgctgccataaatccaggaactggcaaatttgtcactgatgaggaagaggagtgaagacagaccagttagtttctgtgtggcttttgtgtagctttttccaataaacttaatttatatttcttctaacttgtgtgcactccatcgcgattatcttatttaatttccagaaaaataagtaatatggaagttcaaatgattggaagttgaagagtaccgtaaatggctactgtgatgataaaacaattctgtcacatttcctctcacggttcatgaagaacttcaaaggtcaaagaaaacaagtgtgattatagcaatctaaaattgggcttttttccttctatatacaatatttcaaacttatttaccaaaa

SEQ ID NO: 1610 - DNA, 448 bp, Nicotiana tabacum
ttttacagcaaaaggaggctcaagccacttcatcgaataacaaagtcaggggtccaaaagcaaataccgtactcacatatttactaacacaaaagattgttcatacgattatatattccaaatttatccccagattatgagatttaaagttcactcaaatgcccaagcattctccctcctaacctcctcttcttcctctggagtgaagtcattcttgatgttaaaggtcttccggatctcctctggtgtcttccctttaatcatgtcagccacagtttgacatgtgagatcaagcaggctcttgatgttcaagtagttggcagccaagatgagatcgaatagggtggcctggtcaactttaacgaaatcagaatcaaagcccttaagctcatcctcagaagccttatcctcagttttggtagcatcaacatggcgcttgcagtactcg

SEQ ID NO: 1611 - DNA, 494 bp, Nicotiana tabacum
ggtgatggtgccggagatcataatcggcagctcaacgcccagcgcttcaaactccgttttcaccgcaaataccgccgctttggcgttaagggtgtcgaaaacggtttcaatcaggatcagatccgcgccaccttccaccagcgctttggtggactctcgataagccgccaccagcccgtcaaaagtgatattacgaaatgccggatcgttgacgtccggagaaatagacgccgtgcggttggtcgggccgagaacaccggcaacgtagcgcggtttctctggcgtgcgcgcggtccactcgtcagcacaagctcgcgccagtttcgccgccgcaaagttgatttccgccgacagggattccatctggtaatccgccatcgcaatggtcgtggagttgaaggtgttggtttcgatgatatccgcgcccgcttcaaagtaggcgttgtggatagcggcgatcacttccggtttactgagtaccagcaggtcgttgt

SEQ ID NO: 1612 - DNA, 505 bp, Nicotiana tabacum
ttttaacaaacatattagataatggcttttattcatacttaatacagcaagctctgaagtagaaagagcattactattacagctttgccattacaaaggttttatatattacacgatgatcagtgttgaggcttcccttcagtcactttatccatggcctcacctttgtagtagcaacacctgctgcagccgtagtaattgcggcggccgcaacaaccatagcggcagtatcctccacgtccaccaccgcggccgccacctgggtatccaccacggccgccaccagggtatccaccgccaccacggccgccaccagggtatccgccgccagggtatccaccgccagggtagccaccaccggggtatccgccaccatattgagcttcatgcacttcattcttgttatcggatttctttgagtcctcttctgaagtggtggaagtctcagacaactccctagctaaaacctcagagcttatcattataaaaatggccaaacaaaggc

SEQ ID NO: 1613 - DNA, 432 bp, Nicotiana tabacum
cagagcattccgtcctcagcaggctaccgaacactgaaacttagctttacagtgatgttattccagaaaaacgtgtacgaagtactaagagatgtggatatacagaggagagttggaatgatattggtttccggttcagttgctgtggacacaatcatttaactggtggtgtaagtgtatattcatatgattcagcacagtggattcttgaaagagatatagtgagcttgattttaatttcagtgcgagaagtatttgtgtcatttatgtaaggttgcaggttcacccctattgatcatcttgtagatccttttgtaatactccctccgttcacttttagttgtccactttagacttttcacgcccattaagaaacaaaaatgagatatgtattttaaaattttacctataataatgatagcatttccaaaa

SEQ ID NO: 1614 - DNA, 510 bp, Nicotiana tabacum
tttttacacaatcaaataggtaagaatatcaaaatatacaggactaaactggaaagaaaaatcctagtaattaatcgccagcacaggctgaccttggcctagatattttcaacaaaatagacaaattgaacttctgttacagtagcttgagtggcaaaaatcctaacagttctgttcattggaggatgtatgcaaattccgtcttttgcactgccacagcactgctgcaatcaagatcggaattcccagtagaaatctcagcaccaaaactccacctattcctataccgccaaagaacaatacaaaaacagaatagtactcgactttgcatcggaacgtaagtttcgaaacgtgaatgtcctctttgcaccaataacggcaagtagctctgtcgctgttttcttcaatagtgcactcgccgccccgatccgaaacaatcgaatcccgcggccgccatggcggccgggagcatgcgacgtcgggcccaattcgccctatagtgagtcgtat

SEQ ID NO: 1615 - DNA, 405 bp, Nicotiana tabacum
tagactctgctgcttacaccagattgtatctttttggaatgacgagttctctggggacgcaccctcgtatctgttcattaggaggtccagagcatattttgaaggaaagaagttgcaaattttcatgttttcgttatacagacgtagaatcttcttggaaagaattgcttccttcaaaaggtcagaagtttattagctatcgccacctaaatactagaaaaaactggtcaattttttctgctgcaactggtgatgcaaaggatccggatgactcagaagatagtaacaaaccgacagaaagtgaaactggatctgtaaatagtgaaattttaaggaataatcttgaaagaatcatcgggcgagatgactctgcttttagtggaatagaccttgcagctctgataa

SEQ ID NO: 1616 - DNA, 441 bp, Nicotiana tabacum
ttttggaactaaaagcatattcagttagaaaatcgtagcaagaagtagtcaatgactcttcaatacaagagatctaaacaaataaaagaacttccaaaatatacaaagtactgcagcttattatatctccaaagaacaaaataaaacaaaattacaaagcaccaaaattaatctaaaaatcaaagccacccatatctcccatggcatctccgtagccatcatcataagcagccatctctccaacatccgaaaccatatctcccaccaacaaaccaccaagcaatccagcacccaatcccaagcctaatccacctcccattccaaacttgttctttttcttaggttgttgcaccggtggatatccgtacccaggttgttgtacgggtggatacccgtaaccaggctgtggttgcggatatccataaccaggtgcaccaccag

SEQ ID NO: 1617 - DNA, 389 bp, Nicotiana tabacum
tgctgaaatcaactgaaggtcacttcagaaatggggtgcttgatgttaaggacttattaaaaccttctgcaccaaaagcacctaaagcatttgatgcgaagcagtcttttgctagtaaagggaagaagaaaaagggtggtaaaaagaacaagggcaagaagaaaaagggtcctggtaagaagcgccattaaacatgggataaatggcgagacctccttgttttctttatatttttaagctttagattccagtgtagtagattatatctctaatatcttaaaattttgttgtagtctcctgaattttctgtgttctgatgatgagtgtagtaatgcttaatggatgtacacttttttggtggaagagaaagtgaacattaactgacaaaa

SEQ ID NO: 1618 - DNA, 415 bp, Nicotiana tabacum
ttttagacaaaagtacatgtgactcttattcatgtcttatgtttattacagcaaagatcatctcttgaccacttcaaccaaaataaacaaagtgtgtaaactataaaagcgagacaaaataaattgtcccacactaacgctttcacgcaataattcgaccaaagatgatcttattagaggaatgaccgttctacttagccacttcatcacttccaggcatttccaaggggaaatttgggtgagcttgaccattaggacagaagataaccttataatttgtactaccaccagggcaagtaaaagtgcttgtaggatcatcttgtgggtagctataggcgtcagggcatctttgtttgaaaaattttgagaaaaatgtaggaccacaaggtccttgtgtgcaacaatattgttgtcc

SEQ ID NO: 1619 - DNA, 448 bp, Nicotiana tabacum
ttttcaacaaaataacatgctctgattttaaagatccagaataaattgttgcatgagattgatctcttttccgctggaaaactaagagcaaatctctccatccatacatatacgttaacatagacatactgcaaaaaattagaagagctaaaatgcatttagcggcctcgaccacgtccacgtccacgaccacgcccgcgaccacgtcccaaaggctttccagctgttggcttcttcggcttcaccctaggtgtttcttccaccagcaaagtttcaagatttaagctgtcagggaggatgtaataacgtatgttgttacccctcacactcaggtgatccaacgtcactggattctttccctttagtgtaagtttgacagccttcaggtgtgtgttcatgctaacatccacacctgtaatggttccatgaacaacggtgccgtttttga

SEQ ID NO: 1620 - DNA, 270 bp, Nicotiana tabacum
ttttaccactgcaaaaagactgatctattaatcatgttccttgggaatatccaactatcaataaacagatacaagcttaactgttagttgctcccacttccagatagtgttacatccgtatcgttttcttctgaactaaattagctacaatgctcgctaaacctaattataactataacacaaacaatcataagggggcgaggaaggtggcaaaagaataagactacataacgagatatattacacagctaattctacgtattagctaaa

SEQ ID NO: 1621 - DNA, 523 bp, Nicotiana tabacum
catagtggtagatgaagattacgtgtttcctcaccctcaatttccctagctattcttgaagcttctttttccaactccctcatttgaggacctttctcaagctttgtagtataaagttcctcattgaacgtgctttttactccaaatagtgtttcattgacctcaaactgatcccagcccctgttccagtggccatcaaatatattatccagttcaggacattcaagagcatcgtcgtcaggcacccaacgttccaactgcctctctacctcaacatgctgggactgtgatatgcatgaatctgtcaaaagctcctgctgcttttcccgcagcaattcggcttggaggacatctaaagttacaggcacaccctttgcgataacttgcacaagctctttacccggtattatcaaagtctttgttggaggtttgatcaaagattcaggagtattcttcctcccctgggaaccatcttttatcaagtgggccattttcagaataataccaaaatctttgtcagcat

SEQ ID NO: 1622 - DNA, 161 bp, Nicotiana tabacum
atttattgaggtgaactcgtcctaagtttgttcttgttcctcttttaacataatctgtacaaattgagaaggaaagatggtacatatgtacctcttttaacatgacctacacatgctgctactgaatgataaaagcttggggctatattatgatactttaa

SEQ ID NO: 1623 - DNA, 468 bp, Nicotiana tabacum
cttcatcttaccaccgctttcctttatcttcgtctgtgactttcttgtttctctctctcgctctcgctctctctgacgtatataaaggtaggcctttagggggacatggcgattgcagtggcgactcaaccacaccaactcaaggtaacaatagaataagacaattttggaaaaatcaaaaactattgaacttttggatttatattgaaaatttgtcgcgagcttaaggattttaggattttaacctattgaattatcagtattctcttttattcgatttcaatattgcgatgagcttgaatttgacatatttgtggcatcccttttggagtaataaattttttctccattttcaatttgtggtaaataattagtattacatttattatttcagcttaaatgacagatttttggagcagaatttagtatacattggaaaatttgcgaaaaatcttcagtttacctgag

SEQ ID NO: 1624 - DNA, 202 bp, Nicotiana tabacum
ataaaatagcctttattatcaatcaataatacaataatctgaaagaataagcaaattacatataaaaaaaattactacacaagtcatattagcagagcgccatgatcacatgcacggcccgttattatacaatcgaagaagaaaaatatttacgtactttattacataataacatgtattgaattttttataataatctttt

SEQ ID NO: 1625 - DNA, 493 bp, Nicotiana tabacum
tttgaaagaaaaaatgtggtaaacattagtctcaaactgatccacatttgtatttttatcaaatgatcccattgagaacctgtaacctctgcagtgaattaagatccgccaaaacaaaacggtaaaaccccttcaacaagggaaagggtgtggggtttcaaagatttaacccgctctaaaattttaaattattacagaaggcaaaggaaaattggtaattgtctccccaaatgaatcctcaaacgtaacaccaaaaagattttcatcaccatctatttctaaaaaggatgtttagaggctggcttaggcaccaccggatccgtatttctttccaaaaacaatgacctgaagcttgtcgtatccggccaacacaccagcaccagcaacagctcggaggatgtcctgcaccagcacccttgaagagggatttggcaccctcgttcttaacaatctgggagaatgcatcgaacgaactcttgtacttaacggcctc

SEQ ID NO: 1626 - DNA, 541 bp, Nicotiana tabacum
gcggccgctctagaactagtggatcccccgggctgcaggattcggcacgaggggcagttcttactcaagagcaaccacattttgtgttgtttccttatatggcacaaggccatatgatacctatgatagacatagctcgattattggcgcaacgaggtgttattatcacaattcttttaacaccctcaaatgccaataggttcaatacagtcattgcccgcgcaatagaaacaggactaaaaattcaagtaattgacctctattttccaagctcagaagcagggctaccagaagggtgcgagaactgcgacatgcttgcatctatagatatgatgaagaatttctttcttgctgctcaaatgcttgagtcgcaagtggtagacttgttgcaagaattgaatccattaccaagttgtttaatttccgatatgtgttttccttggacaactaatgtcgccaaaaatattaacattcctcggattgtttttcatgggatgtgtagcttttctttattgtgtttacacaatttaagagaatggaa

SEQ ID NO: 1627 - DNA, 250 bp, Nicotiana tabacum
aaagctccgatcctcccgacttccgatcttccagctgattttgactggcgtgaccacggcgccgtcaccggcgtaaaaaatcagggctcgtgcggttcatgctggtcgttcagtacaacaggagcggtggaaggagctcactttttggcgacgggagagctggtgagccttagtgaacagcagcttgtggactgtgaccatgagtgtgacccggagcaacaagatgcttgtgatgcaggttgcggtggtt

SEQ ID NO: 1628 - DNA, 441 bp, Nicotiana tabacum
cctcgtgccgcttttctccaaatggaacgtctatttctcttatctcttctcgctttcgtacttttctcgtcggcgatagcgttctccgacgaggatccgttgatccggcaagtcgtgtccgaaaccgacgacagtcatctgttaaacgccgaacatcacttttcacttttcaagtcaaagttcggaaagatctacgcttcggaagaggaacatgaccacaggttcaaggtattcaaggcgaacctccgccgtgcacggcgtcatcagctccttgacccttccgccgaacacggtattacgaagttctccgatcttactccgtcggagtttcgccggacttaccttggccttcacaaaccaaaacctaagcttaacgctgagaaagctccgatcctcccgacttccgatcttccagctgattttgactggcgtgaccacggc

SEQ ID NO: 1629 - DNA, 230 bp, Nicotiana tabacum
tttcgtgcccattaatctgcttcaagcgtcaggatcacggagtgctcttggtaggttatggttctcatggctttgctcctatcagactcaaggaaaaggcttactggatcatcaagaattcttggggagaaaactggggagagcatggatattacaagatttgcaggggtcacaatatctgtggagttgatgccatggtctctactgtgactgctgcccatactactaat

SEQ ID NO: 1630 - DNA, 359 bp, Nicotiana tabacum
ctcatctatgttaagctttacacatatcaagtatttagagggctcgcttacatgcatactgttgctggtgtatgccatagggacttgaagcctcagaatgttttggtagaccctcttactcaccaagtaaagatctgtgattttggaagcgcaaaagtgctggtgaaaggagaggccaacatctcatacatctgctcgcggttttatcgggctcctgaactcatatttggtgcaacagagtatactacttcaattgatatctggtcagctggctgtgtccttgctgagcttcttctgggccagccattattccccggagaaaatgctgtggaccagcttgttgagataatcaaggtgct

SEQ ID NO: 1631 - DNA, 260 bp, Nicotiana tabacum
agaaacttgctgaggagagccagagaccggtgtatccatttgcagctatagtgggacaagatgaaatgaagttatgtcttttgctgaatgtaattgatccaaagattggaggtgtgatgataatgggtgatagaggaaccgggaagtccaccacggttagatctttggtagatttacttcctgaaatcaaagttatttctggtgatccgttcaatcagatccagatgaccaagaagtaatgagtgcagaagtccgtgaca

SEQ ID NO: 1632 - DNA, 260 bp, Nicotiana tabacum
ttttaaaactgaaaactgaaattaacaatataactgaaaggcgactattggaacaagtgttgattatgaattatacagataattaaatcgacgagataaatatgctagtgcattagggttgaagaagtagccttttacattgaggcatcaaggaaagcatcagatacatcatcaagttccacattcagattttttgcagaaggcaatccagccaccacattatgttcaatgccacactcatttgttcctcttctgatctt

SEQ ID NO: 1633 - DNA, 264 bp, Nicotiana tabacum
ctttcactgagagaaaaagagagagagagagagagtgggggtgggtgaaggctaaagaggtttgggattgacgaggcaaggaagcgaaaatgggagctggtggtaatatgtctgttgtaaccggcaagactggcgaaaaaaagaatcctcttgaaaaggtaccaacctcaaagccacctttcacagttggtgatatcaagaaggccatcccacctcactgctttcagcggtctctcgttcgttcattctcctatgttgtgtatt

SEQ ID NO: 1634 - DNA, 321 bp, Nicotiana tabacum
ttttgaactgcaaaactgactactgaggaagtcactcaagaatagagcacttctcagcaacctgcagatacacaacagacacagtcctcgtcgtgcttctactagcgcaaaacaaaaacaaaaaaacttactaaatttactcaagaaacccaaggggaaagatagaattaggaaactggctactgagaaagccaatcaagagtgaaacactcctcagcaacctgtacacagagacctgggatagccttctcaacatcattccactgacaaaaaacttcattgtcacaaattacacaactcaacgattcaagaaataccaga

SEQ ID NO: 1635 - DNA, 580 bp, Nicotiana tabacum
ttttagggacaacacaaaatgctaattattcatgaaaatatcagttatatttcaaaacattgaaataaaaatagagtagaattaaagagtaaacaactgacgacgcaacgtccccaattatcactttcctcgagaatcaacaatggccttattcaaaactgaagccacttctattatcgcatacactccactccccatatgttgaaaaggcaatttaagtaaggcaggagtatgccaatgctttttcctcggatagttcctcagctgttgcgtccaacttctttcttgagaactcatcaattggaagaccttgaacaacacaccattctccatttttgcatgtaactgggaaggaataaataagcccagctgggacattgtatgacccatcagagtaaacacccatagaaacccaagttccctctggagttccaagaacccaatcacgtatgtgatcacaagcagaactagcagcggaaagggcactagaaagctttctagccttaataatggcagcacccctctgctgtacagtagaaatgaactcaccattcaaccatgcatcatcagccacaagttt

SEQ ID NO: 1636 - DNA, 444 bp, Nicotiana tabacum
gattagccaaatttgaactcaaatggagctaggaaccggttacaaaagggaatcgttgagagcagaggaactacaatagtgtaacttaaaactaatactcaacccagccaccacacctccgctacataaaaaaactaacaatatttacaaaaacagagccacgacaagtcggacacgtaacatatatagagtcaagcagctgaaacatgcatgttgagcctcgattcataactcacaggtcgtaaggaggaggagggcttctgggtccaatcccactagcattctcgtatgcaaatgaccctgatcgcctgcggaatcgaaatgcctcctttcctcccgcaccagcaaagggagataccggaggagtggaaccggcactggcaggcgaaactggaggagagtctttactcacatatcctggaggctttactatcattatacgtt

SEQ ID NO: 1637 - DNA, 412 bp, Nicotiana tabacum
ggcacaagatgttgatcttggcaacatcgcttctatgactactggtttcacgggggcagaccttgcaaatctagtgaatgaagctgctttgttggcaggaaggcagaataaagttgtagttgaaaaagaagatttcattcaagctgttgagcgttcaattgcgggcattgagaagaagactgccaagctgcagggcagtgagaaggctgtagttgcaaggcatgaagcagggcatgcagttgttgggactgctgttgctaagcttctttctgggcagccacgcgttgagaagctaagcatattgccgagatctggaggggctttaggatttacttatattcctccaaccaatgaggacagatatctgctctttgttgatgaattacgtggaagattggtcactcttcttggg

SEQ ID NO: 1638 - DNA, 449 bp, Nicotiana tabacum
ccgcttgttcccatgcgagttgatagattcggttttgtgaagcaggaacatagccctactgaaggtttagcaaggagccggtcggcctttgaatatcagagagatgagagaaggattaggaaatggagaaaaatgataggtgttggaggaagtgactggaagcagtatgttcggaggaaaccacatgttgttaaaaggcgaatacggaaaggaatacctgattgtctaagggggctcgtctggcagctaatttctggaagtcgggacctcttgctacttaatcctggagtttatgagcaacttgtcatatatgagacatcagcttccgaattggatattattcgagatatttctcgcacctttccctcgcatgttttctttcagcagagacatggacctggtcaaaggtctctttacaacgtttctgaaagcatatttctgttctttga

SEQ ID NO: 1639 - DNA, 546 bp, Nicotiana tabacum
ctgacgagttacgatcgtcgtcattccttttctttttgttatactccatacgttattgcattagatatacatacatacatacatatggtggctaatattgtagacaacctatatgcctcatcacagggccaccaattctactagatagagcacaatcctaggcttatgtcatagctgccagtgcaagaaaccttatttccacgtaacgacatacataattaaccattatatatttatattttcaagcgcttgatcagccagatatatatcctctcacatatttaacgtcttctatttaactttaagcatattaagtctctctttaatccaagaaaccccaactttagcatctttagcacacttaatatgtgcaatatagccagtatccctgctataatacaaccaaccttccttagacaccttcttgttacaaacattgcatcgcgcaatccaatgcatgtgattgttgtcattgataggaaacgagtagtaaagtcgaagagtatcctttggagaatcagctctcctcgcgatgccatataatgt

SEQ ID NO: 1640 - DNA, 388 bp, Nicotiana tabacum
cccaattattccgtttgttcttttccttggggcatcaacctctttttgggctttttattgggtattgacctgtggtggatatgctggaaatttatctcccaagtcaagttttgagcttctgaaaggagacaggaatgctctactcattgatgtccgacctgaggcaaggcgctctcgtattttctgcagaatagtttgtgccaagatgttctgtgatctttgttctgcaatgtttttccattacatttatcttagtaaataatgttcttatttgatacatgtgtacgttgagggtaaagacgaacaaatgtcccttatatctttcttcttcctcttgtatgcttttctgaaggatctcagagagaatgaaggcattcctgatcttcga

SEQ ID NO: 1641 - DNA, 330 bp, Nicotiana tabacum
ttttagactgcttgatctaaaattttcaataactttgcgaagattacagcctgcttttcttgtttcaagaacatcctgaatcaactagtatgtatataattatctatttgttatatatacagcaggaagataatgtagctcaccagagctttgtacaaaggaaagaacatacataggatgctgaatgggatgcatctaaaaaaccatttcagttccatctcttggagttctttgatttctttgacttctgttttgctgcttggaatgccagcattttctgttttttccgagcttccctttccgcctttgacatcttggatttcgctttag

SEQ ID NO: 1642 - DNA, 304 bp, Nicotiana tabacum
atttattcatattcaatggatatttcaagacaaatatagggttcgaaccaaagctactgggttcgatcgaacccgctcccgacactctagctccgcccttgatagtagaaagagttactaggagtcgaacttgtggtgttatagtttgaattgtgacaccttgatcattgaacaatttcagatattcgagtttaatagctagctagtttttatgtctatggtagtacaccagttgagattatagtcgagggatgtgtaaagattttaattacattgttcactattttattaatttgtttgaaat

SEQ ID NO: 1643 - DNA, 481 bp, Nicotiana tabacum
ttttgtgaaagagttttatattgtgtagagaaagttaaactcccaaattcaatccccaattgctcaacgcacaatgattattacatatgaaaacgagacccgttaagtatgaaacagataacccgaaaacccgacaacaatgaagaaaaccccaagaacataaacccggcgaatcccaaggcaactgagatatctgattgtacacaaaatgcattattagccgtacacgtgtctctttcccttaacgtccgagctaacgccgttcccgccgaatccgccgacagcagcatatatgcgaaaacctgatcgtggctaaaatcgaaccagacttgaacaacttcgggaaacacagtggcgcctcttgaaatttcccaaactgaagctccaatttcaaacagtgaatacaaagccacaatcgcagctgcaattgcgacaaacctgaaagcatcgaagttgtaccactgaggagaaccggagccac

SEQ ID NO: 1644 - DNA, 417 bp, Nicotiana tabacum
gggttgtgaactaaaaagctaggtttctacttcaccaattatcaatccacaattaacttcctgtctatgcttgagaatgtctggtaaaatgccttgaagtgcttgtatgcaatatcaatatcttcctttccgcatatctctctcacgctgtgcatggatagctgagcaataccacaatcaacagtacgaattccaactcctgaagcaagtatcggacctatagttgatccacatcccatatcatttcgcaccacaaagtcctgtgtcggaaggctgtggagtcttgcaacttctttaaaaagaaaagaggtaactccactcgtggcatagcgttgatttgcattatgcttgattacaagccccttctgtaattcaggacgatggtgctcctcatgcttatccacaaaattagggtgg

SEQ ID NO: 1645 - DNA, 223 bp, Nicotiana tabacum
attcaatgccgcttcagttctcttagttcttcttcttattaccatagttacggctaagaagtccggtgatgttacggaattgcagatcggtgtgaagtttaagccaaaatcttgcgaacttaaggctcacaagggtgatagagtctcagtacactacagtggaaaacttacagatggaactgtatttgactccagctatgagaggaatgaccccattgagttt

SEQ ID NO: 1646 - DNA, 364 bp, Nicotiana tabacum
ttttataaaaagccgcatttatttatcgccaaacaatggagtacatggaaacgttaaccatacagctccaatttattatttggaggctacatatatgcctataatcccttagccaacctggggagtttgtacaacaaagtccaatacattaacgaaaagacgaactcgattacatcttaaatcttctgtcacaggagtaccattaagtactgtttgaacattagttagttttggattttccttctgaattatttgcatagcaaactttgctggtgttccaagaggttctggccatctttcctttgtcactcctgggcaaccagactgagacacatcaagttgcaagacattgatttccaaatct

SEQ ID NO: 1647 - DNA, 471 bp, Nicotiana tabacum
ggaattcaagctttttgcatgtagtctcaaaccaagattcaatccccagattcttagtctcacctactaatggcttttctggttctactcctcagtcttgtgtttacaggccatttggtacatttctgctgtgttcagattcagactactcttgttttgaggaatctgaatcagttttggatcttatgatggtaatgaactcagatggccaacaacaggacaacggtttcttgattttcaattatgggccgattctggaatgcctcaagcatagagtaatctgtaagggaacttctcagctgagtgactttggagtgaatcaacttcaagcaggcatcattcaacagctagaagcaattggaattggcggacagtggcagcaaacaagtaacatgagctttcttaggaacatggagaacagggtggaagcatctttcgcgaagaagatgaatgcttttgatcccggcaagg

SEQ ID NO: 1648 - DNA, 378 bp, Nicotiana tabacum
ccaccgtagagggcggaggagggctgccggcggcggctaaagaggcggcagaactgaaaagggagttgcagagagcagtaaaggctgtagttgaagacgatgattacagtttagaagtcaccgatcgagccatgcggtgtttatgtgctttaaaagaattgaaattgaaacctttgaattcaaatcctttggatattcgtagcctttctttgagtttaccaattccaccccatgaatttgtttgcccgctttctggtcagcttatgaaagaccctgttgttttggcttctggtcagacatatgacaggccattcattcaaaagtggctgaaggatggccatcgtacgtgccctgaaacaaagcaggttctttcccatt

SEQ ID NO: 1649 - DNA, 352 bp, Nicotiana tabacum
tttgtttatagcatcatatcaatatccctcaatcactagtgaattcgcggccgcctgcaggtcgaccatatgggagagctcccaacgcgttggatgcatagcttgagtattctatagtgtcacctaaatagcttggcgtaatcatggtcatagctgtttcctgtgtgaaattgttatccgctcacaattccacacaacatacgagccggaagcataaagtgtaaagcctggggtgcctaatgagtgagctaactcacattaattgcgttgcgctcactgcccgctttccagtcgggaaacctgtcgtgccagctgcattaatgaatcggccaacgcgcggggagaggcgggg

SEQ ID NO: 1650 - DNA, 495 bp, Nicotiana tabacum
ttttttttaaaatatcaaaagactactctgattactacaaaaataatggaggaataatcgctttatacaatcgtttgctcttcttatacacacaaaaaatcacccataagggaccctaacaaaatcgtcccctgtacctaatactacagactccgggtctcacttcttcccaatgaggaaaaagaatcaaagaattatcacaatacaaaaaaagaaaaaaataactcgtatacgctaaaagcgtaaaagaatttttacactgtcacatcacaatctccgctagtgttggtcaaaagaatcatgaaggctcggtctatacaaatcataaggtgcccataaaaaatcaacaggacaaggattttcttgatcaagcctaacccaaggtttacctttaccactccaatgcaataaactaactggacctggatgcaatgttctacaactattcaccaaattatctccacctaatccatgttgattccatttatgatcaat

SEQ ID NO: 1651 - DNA, 530 bp, Nicotiana tabacum
ttttggagatcatagaatcctctaagatgttcattacataaggagccaccaaattcagatgagagcacacacaaacttcaggttttaagagcattctagctaagtggcaaaatctctgagaccagcaaaagataagcttttgatagagcataccgtgacagacactgatcatcatcaatcaaattgaaaaccattgaatgggtacagttcatcaaccaacaagctgtactcaaatacacaacatagaaaccaaagataagatcatgaaaatttcacccaacaaaacttatgggttggcatagtgaaaaaggaaaacattcacctcctctttagtcaaagaaaaatttagcattctcgtacttaacatcaatactcagatggagaaatcacgtcatcaatctttagaatcatcttgacaacctgagttgcaagcaatatctgttgttgcttcccaattaaagtctcgaagacattttgctcccgcatgtcatttgtgccaacatcattgcagtctattccacagcatggat

SEQ ID NO: 1652 - DNA, 553 bp, Nicotiana tabacum
gccactgataaagatgatgagaacatcatcacaaatgttgctgtcgcactagctacctgagggataactccaatctcaagaagaagaggaccaagaatgaatccaccaccagatccaagcagtcctccaacagtgcctcccaatatgccacaaagggcacagaagataaggtttgtggcagtccattgaatgtcagcctcacatattgactctgtattcccgtctagtctcctcttcttgctttccttgtacaatttcacacattcatacccaaacactgcgaatgctactgggaactgtagtaagttgagcacccagtacaatggagtacaagctactagattgttcttgaacacttgaagaatcagaaatatgaaccatactagaaagagcaccataattctcttcaagttaaggttgaacctaaaaatttccagtggtgttttctcctccctaggaaccaatgactcatacattgtatcaataacaacaagttcaccacgtgaattaactggaacttcttccattgatttcttgagaatagtttcttctt

SEQ ID NO: 1653 - DNA, 401 bp, Nicotiana tabacum
tacaatcagggacaaaataagatcagacgactcctagtgacgtaggcaaccagcaataattatctcaatgaatctaagcaatgcaaatggcctacatttcaggagtcgcctgagattctttttgtctgcgactgttgtgcttcgaactactgtgggttttcgttgatttttgtccataaattaatttgtacttcagcaatcacgaaaaaactacgcgttttattttactttctttcttcttccgacggcagttatttactatagaactaagaaaaaaacttaaatgcttcagttttaaatctttaatgcagtttgatgtactgataattacaactggcctaatgttcaaagatgttttttgcgtgttgaaatatgtttattgtttcctcttctctgtgatt

SEQ ID NO: 1654 - DNA, 360 bp, Nicotiana tabacum
gtgaaaggagacccggcaagacaagcggaaacgccgaaggtggcacagtcacatgcaactcaccaccaccacgcgcctacccttaacattagtgacagtgccctcaagttcacgcacattctctacaatctctctcctgctgagctgtatgagcaagcaatcaagtatgagaaggggtcatttatcacgtccagtggtgcattggctacactttcgggagccaaaacgggccgttcccctagagacaagcgtgttgttagagacgaaaccactgaaaaagacctttggtggggaaagggctcgcccaatatcgaaatggacgagcagactttcttaatcaacagagaaagggctgttgat

SEQ ID NO: 1655 - DNA, 346 bp, Nicotiana tabacum
gatagacataacttggatcatgaatcttgatgataatccatgattttacatacttattccatgcatcataataagcttctaagttcttgttgactgtctcaagctgtggatcaacagctttgacagcttcaggtggaagaggtttgaaaccaagcatccaaccctcaaacagaattaccgttaaaggcccttcaacctctggccatgtggagggatcagctctgtcacctctcccattgtacgcagatttatcatatcgaggaagctgtcatcttcacaccttcttttgtcactttgcttagctctgccagtgtttcaacagacaatgagagatcatggcttccag

SEQ ID NO: 1656 - DNA, 299 bp, Nicotiana tabacum
caacttaaacgtgatgcaatatagaagatcaaaagctgactcattttctgcaagaaacttcaagaaagtagctcccaccagatttctgggttttaaagcttccagatcgagcatctggataagcataaatgtgatgttgacaccagcaacagcgaatgggtattcccaaattgctctatcaccttcctgctttcggagaagatcctggaaagatttcgggaagttccttgcaaagtataacagattctccagcgatataaatccaccacccctaaagtcagtagaaggatcttttcctt

SEQ ID NO: 1657 - DNA, 403 bp, Nicotiana tabacum
gaaggaagcaaggtccattgaattctgtggctccaacagaacgagcacaaatttcttctgtggacgatctttatgacttcatatgctcaggccccctcatcaataagataggtctgacacccgaaaaagtggctgagtccattgataagtggatagagtatggatttcgcctttgtagattgtttcagctcaaccagctggctctcaacgagcctcaaaaaattcgactctaccactactatattccagtcttcttgtggtgtgaacaggaaatttcacagcatagttccaagttcaaagacaacgaagaaatccctccgttggtgattggcttcagtgcgcctcaaggatgtggaaagacaacactcgtatttgcattagaatatctttttaaaatcacagg

SEQ ID NO: 1658 - DNA, 466 bp, Nicotiana tabacum
aacatcagcctcttggagcatgcttacatcatttgccccatcaccaatcgctaatgtattttggtgtgttccaactttcaccaatctagtaacaggagctttttgtttaggatgtggagcggcagcaaataacagatgcacaacttattgcaagctccaagaatgatttttccagttttttgtcaagagcaaatgacaatgatttgccatcaatgatcaaaccaaatgatgcagtaatttctttgcttgagcttatttgtgatattccctctcttatttgctttgtgatgctatcatgtgaaacctttgcaacagtctccttgtttccttggttttctaagtccaatatgtcttgagaatctaaagtaataataatttgcctcatatctggtcttaataaactacaagcgtacccaatattgatagctgtctccatcttatcaccagttaagacccaaatcttaat

SEQ ID NO: 1659 - DNA, 418 bp, Nicotiana tabacum
actgaatctcaaatgtcagtcacccccttcactttcttactagtggcatctcttgatttgttttttcgcttttttgaagatcttttttctttcatttcttcgtgctgctgctcttgctccattgaatcaatctcacttaactgctcgctatttgcaccaatagaaagtctggcatccttgtcctctgatctcccctcattaccttctggctcaatgaccgacattccagttaaagtacagtcaaacatgaacgtgcttctttctaatctatctactctatcgaaatgcctctgagaataagaaataagaccttcaagcagttctccaatacccttaatctcaagaatctcggcaggtgagagaacacagaatgcccggaaaagaacatattgtgcaatatgacaaaactttggcttcc

SEQ ID NO: 1660 - DNA, 422 bp, Nicotiana tabacum
acaattggatttgacagtttattagacaaattctaaagaatgctaggacgcagtattgctatattaggagcttaagtcctcaattacaacctgtatatcagtatataagcacagagaagcactttaatcttggtggctgtcctattgaaattatagtgacagtgtcttcaattcaatgcctctccgatatggttagatataagggcttctatagaatgatatagccaaggtgtataatgtgctttcgtctattcaattctctccagattatacttcacaatttcctcaagtgctgctcggaaaggactagaaggaaggcattttaggctctgcagtgctaaatcagctttctcctttgccaaatcttgtgctcgctgaattcccccggtggtcttgactagattaatggcctcctcaagaga

SEQ ID NO: 1661 - DNA, 450 bp, Nicotiana tabacum
ttttttcagtatttggcctcttaaaccgttccaaaatgaagctgcattaacagccctcttgccgggaagttgaacttccaaaacctctagtgccgtgtccccaccgcaaggaattaccagtgaacctttagtaaaaagcacatcattggcttctatatcttgacttctgataccggtgtaaatccgagtagtgataattttaagctctatactactgctctcgccactgctagggtcaatgaccataagtctagctcgagttccaggccatcctgcaaatgcccgaaccttattatgaagcacttgggcatcttcatcaaaggataaccatgactcctcaggagttatcttgggagctagggtagctttagagtcatcttgctcttctgctcttccacttgcagacccatcaaatatagacggaagttcacgaattagaagtttggaacc

SEQ ID NO: 1662 - DNA, 286 bp, Nicotiana tabacum
ccacatctttactgctcccgccgcgtggagctgagggtaggcggcggctaggttttcgccgtaagggccaccggaatgctgcatcctgcagtccccagctctctgatttgcataattttgggcaaaggccgctaacctattgtcccatgtcatgggaccaacaccaacttgtctacgatgctgcattgtgagggttaagataatcttggggagagttttgagcttgagatgagtgaaataatatagtaaaggtaatgaaacaagcaactaatgttgtggagtatcc

SEQ ID NO: 1663 - DNA, 151 bp, Nicotiana tabacum
actaagcaaaaatacactcttcacttctcttcactaagctgcctctctctttattggtgactcttccccatgacaccatgctagctttcttgtaattgtcactcttactaatagaagtcgtgatcttgacattggccttccagtaccgaac

SEQ ID NO: 1664 - DNA, 414 bp, Nicotiana tabacum
cgcaggcattaatgcaggcggatttgcaacaagatctgcgcgtcgatagcggtaaaccactggtctttcatcagctgatacaggtggcggataaccgctggtactggtatcagcgttatcaccatttgctggtcgatggctttagtttcccggccattacccgccagatcgccaatatttactgcacatggctgcgtggcgaaccaacgcctgcttcgccatttacgcctttcgctgatgtagtggaagagtaccagcaataccgcgaaagcgaagcctggcagcgtgatgcggcattctgggcagaacagcgtcgtcaactgccgccgcccgcgtcactttctccggcacctttaccggggcgcagcgcctcggcagatattctgcgcctgaaactggaatttaccgacgggg

SEQ ID NO: 1665 - DNA, 304 bp, Nicotiana tabacum
  misc_feature (79)..(79): n = a, t, c, or g
tgcttcattgagaggtccatggcacgcttaaggcgctggattctggcatcaacaatctcccttggaaggcgattaagangcttccttgacgtccaaatcgtacattggatcatgcagatcatcatatctaagcccgtaattacggaggcgatgcggagagggatttcttgtggattgcagcgagagggttcttctttggatccaccagccatttcgagaacgtcgatgccattgttcgatcgtaaaacacacacccacacgcactgtgtctctgctaacaaaagattagggatttccctttttg

SEQ ID NO: 1666 - DNA, 415 bp, Nicotiana tabacum
tgtgcagggtgaagccagcactcaaaaatcccatgcgcatactcacaagcatctcctcgctggcatgcccccttgcgaaagtctggacaagggacacaactatagtggtattttctagggtcacgccttcttgcgttttcaccagggtgtacaaagggacactctgtccagtcatgggagtaagctcttgagcatggtttcaccttaaatatgtacattctgaagtcatctgtcccatatatcccaatctttatgtccggaagagagggatcaacaggatactctttcttctcgctcccaaatttagagatgtttggagtcaataacagctgttcttctgcttgttcagagataatctgatcgatgagtccacttgcttccccgtcgtcgctgcttcctccaagcaagtgctcca

SEQ ID NO: 1667 - DNA, 166 bp, Nicotiana tabacum
aagatgttctaacaggtgtgcctagcacatttccagagcctctgttcctttcattcctttcatttcgcactttgttaaaaacctcagagtagttttctgcagattggggatcgttctcattccattcgccaaattttggaactacagctcctctatcaggctgcca

SEQ ID NO: 1668 - DNA, 436 bp, Nicotiana tabacum
ttttgaaatataaaactccatcctcttccattctcagtgtaacaaattggcccaaaaaagaaagaaggaaataaggattattccatagtaatattccaagaaatcagaaatcagaattaacagcaaaaccagctgaaaattcaatacattcaaatactattaccacttttgtaaagtttgagcagtcattaaacataaatgtctttcctaggacaaaatcttgccttcccattcaaagagttgacaactttctttgacaatctgctaacaaagtcaccttggtaccgagagacccagctctccttctgaagagcaaataatttcacgttccttcagtatcatcctgtgaaagagctctggaactcctcgatgttgagctcaggcatgacgtcatcctcgccgtagcaactgcgttgtgtagcggcaacattgactg

SEQ ID NO: 1669 - DNA, 114 bp, Nicotiana tabacum
gggtgaagccagcactcaaaaatcccatgcgcatactcacaagcatctcctcgctggcatgcccccttgcgaaagtctggacaagggacacaactatagtggtattttctaggg

SEQ ID NO: 1670 - DNA, 465 bp, Nicotiana tabacum
tcggggcccaccaagcaagttcccggacgacttattgggcccaaccccaacagataaatccttacagtaaacccttataaacctcctccttgctctccaagccccagctttaaacctaaccctagccaccatcctcacatcaaacccaattgcactacttcgagccctttctttattcatcccatcaaaagctcgattctctacgtacgaacctgaagtagcaaaactcgctttctgggcagtctcagcccgtttatcctgaaaaaacggcgggactgtagtgtccgaaagcgaagccgaatcataaaaaaccgctgctgctacatcatcgtagtaaagtgtcaactttttgttggggtttcggacagtaaaacggaggtcccagttggcggaaatcaatgaattggagagattaaggtttgagactgagagcgagtcgactcggaactcggggagacgggggcg

SEQ ID NO: 1671 - DNA, 388 bp, Nicotiana tabacum
tgacttcagctgacttctgttccaattccttgagcttaatttcaacaattatccctccctcattcttttcatctgggcgagggctgacttcaatattagagaagagagctagagaatttatatttctcaaagcctgttttccagcttcaatgttgaaaacttgtccttgacgaagctgcctaggcaattctctccggacaaccggatattgagtgtttccctcacatacatttcccagcttatcctgaaactgaacaaccatttgagtaatatccccttccaccacctcacaaaccacctccttcgtattcaaattcccaaaattcacaacttgggcgcatgcgtaaccattctcatgataccactgctgcactctatccctaatctt

SEQ ID NO: 1672 - DNA, 485 bp, Nicotiana tabacum
aatatcgtgttcttatcaactccgatgtctctatctccagatagagccacgatgagctgcaactaaaccagcgtttccagcaagagtaggctctgtataattgtaattactacggacatcgtggaaaccgtcatgcttgtctggtccagcaaccatggctccaacaataatattcggattagccttagatgaatccctccatttccatcctcctttacagttatacttgaccttgtttttaggaattgacgcccctctgtggtgaacgcgcttagggtagtgattgccaaagccaacaacataactcattttcctgggattcttgccaaggatgtagtcaatctgggtctcagcgaatcgacgcaggacagcagtggagtagaaattgggtccacagtaccatccaggagtgtcagcagcttcaaggtagtcactaaacaaggtagccaggaagctgcattgactacatactgaagaggttgagg

SEQ ID NO: 1673 - DNA, 382 bp, Nicotiana tabacum
gaagtttctcccttactaatagtcatcaaatagatattcacaaattgaaaagacatgtctcttgacaacccactttaagggagattaagaagtaaactaagttctttcgccgaatttattcattcaccaccagcacaataagacattgctgttacaaagtctcagacatgcctggtgacgcctttgccattatcccatagcatatttctgagtccagctacgagcagtggtctcgtatttggacctgtcggtcttgtacatgtgagcaatttctggtacaagcggatcatctggatttgggtcagtcaatagggagcagatggagagcaggaccttagatatggttaacgctggactccactgctcttttagaatatccaga

SEQ ID NO: 1674 - DNA, 408 bp, Nicotiana tabacum
gttgatctcatccatccacgggttcttctccttggctggattaattgaccgtaaagctttccaaactgcactgttacatttgaaacctgaaccaaatgctatctgccaagttcggtctcccctcttgatccttcccttagcttccgagtaggccaattcgtaccagagagagctacttgaggtgtttccgagtcgatacaatgtcatccttgaaggctccatgtgccagtcagtaagttgcaggtttttctctatttcatctaacacagctctgccgccagcgtggatgcagaaatgctcaaaggccaatctaaaatctgggatataaggcttgatcttcatcttcaacagttttcttcccacgagcgttgcgaagaaaagcaactgctcggacataggaagcacaag

SEQ ID NO: 1675 - DNA, 391 bp, Nicotiana tabacum
caaatacatatgtaacattgtaggaaaacatctggtggtcgggcacaattctcgtctgctcaaacagtcacagcagtggtgcagcgacaacttcaagggaagaacaactagtttggcccctgtgctttactctggtaaagtgattctaaacattctttggctctatgaacctttgactgaagataaaaacttccgttcttagcattcctctcaaacaagttatcgtatctctgcaacacgtcttcccatgatgaatgctctgcaaccccaagaatttgcctagcctctgactctgtcatatttttgcttgctcttttgatattctgtactgcttcttgagcaacaccgtttttggacgcatttgcgagagcttgacgatatgcctgggcga

SEQ ID NO: 1676 - DNA, 417 bp, Nicotiana tabacum
gtagtaactcggtttatgttctgccataggagttaatccgcatcaacgtcgtactccatattgctttttcagtcttctaaaagatgtagttgtggatgtagccactcccacctgaagcaatgctaagacattttccatatgataaatatccatcttaacaatatcatgtaatcatgtttcttgaactgagtttgtctccgagcaatgtaactttccagcagtccacttgcagcataaatacagaaagcttttttggtacaacttggaatttgttgtcttctgtgattattccaaatgtttctacggtctcacgaatcatgataccatgtacaccacttaagccagctattttgcactgaacaactagaattagtgcaccatgtaagtctgcattaaggagacattgtgataactgat

SEQ ID NO: 1677 - DNA, 187 bp, Nicotiana tabacum
ttaaatcccaagccgtgaagggttccgttctgatcacaaaagcccaaggcaggttcttctctaacggctttgatctaaagtatgcacaagccgctggttcagcgcaagctgccaaagatcggctacacaacatggtggccttgttcaagccgctggtcgccgatttcctatcactcccaattccgac

SEQ ID NO: 1678 - DNA, 362 bp, Nicotiana tabacum
aattaaataaaaggcgcaattagttcatgtaaaagatgggaatcgagtgcacctctgtgaaaggaacactttacattcatcctttggagcaatggttggaatatacgcgatatcatcacagccgtccgttttgtgcctcttgaaatcaatcagatgccgtgaacaacgcaataaagatgcatcaaatggtttatagcatacctctgtcccacacatccatggggcccagctccaaatgctagataattcttcttgtaaacccgttcctcttgcctctcctctgtgaaccggtccgggtcaaacttctccggttcaggaaacccctggaaagacgagtcaaaaaccgaagggaaaacaatagt

SEQ ID NO: 1679 - DNA, 399 bp, Nicotiana tabacum
tgatctcaaccattttccgacggatctgacggatctggctgctctgagcataacatgtccgcttctgctggtttggacgtttctttgtaaaagcaatgcagaacatcctgagagtgtagctatctgtagtcttgacatccacatgagcctcaatcaatgtctgccacttctttaccagagacctcaacttgtctgttgtgaaatccattccccagaagtttgtgaggacattcttcccttgcacatcttctgccctcaagcgaatcttcctgaaagattgatcctcatccttctgaagatcagccaaactgacttcaaatactctgtgttttagtccttccgaagcaatcttagtaccctgagtcctagtgaccagggtcttgccaacgttcttgatat

SEQ ID NO: 1680 - DNA, 182 bp, Nicotiana tabacum
catgtatcaaatccatttaccacactagactttcagacttttgggggaaaatatggccatgatgctattgcagagttcgtattttatacttagcatgtcttgttattgcagctaaacagtcccgacctctttgacacatattctgctggaatagtgcttctgcaaatggcagtaccgaacgg

SEQ ID NO: 1681 - DNA, 174 bp, Nicotiana tabacum
gtgaaagaagaaaagttaaaagagaaaatcatggagagcgcgttgaaggagcagagaggaggagaatcggtgcttgacctgtcaccgagagcaacaccggcgggtggtgtcgaggatgtctacggtgaggattgcgccaccgaggaccagcttatcactccctggaccatcgcc

SEQ ID NO: 1682 - DNA, 259 bp, Nicotiana tabacum
tattaacttccaccgacgacaaacgacaaacggcaaacggcaatcggaatggggcaatcttcatcggcggagcaagtgtcgccggagcaaagagaggcagaatctttggctgcttcaactggagctcttccttctctacaaaaagcattctctctcctttctaatcctcaaactcactccatccccctccattcccttcagaagtgttttgggttctcctttaagggatcaacaagtgaagaatcgacagtaccgaacg

SEQ ID NO: 1683 - DNA, 230 bp, Nicotiana tabacum
gtttttgactgatttttacacaaaacctaaacaccacgccaccaaaagtaggccctcgctctggtttttttattacagagaaaaagaggaggaagagcatcagcatccatggctcgccaagccacaagactggtctctaagttgagttcaaagcttagccctaatagtcccacgatctctgcttcaccatcttctccattgtggcatcagtaccgaacggatcttccagt

SEQ ID NO: 1684 - DNA, 289 bp, Nicotiana tabacum
cagcataaatgcaatggaaaatatgatatagagagtgaaataatccagattattactattgttcatgctactaatggcaatcctgtcaaaactttcaaacaattatagcaaacaaaataatgaacaatagtaacaagaggcaacgagctaattagctgtctataattacaccgcactatggccttactgatcaattttcactcaaccacaaccttcaccttcggtttagaaaggataattttgaccaggtcgatgtatgtaacaggtttatagaaataataaccctgct

SEQ ID NO: 1685 - DNA, 265 bp, Nicotiana tabacum
gcaaatgcggaacaaaaccggattctcagattgaccggagaagcaaggaaggaaactaacagcacatcatcagccatgggttccgatcctgaaaagttgatgaccaaagccgataaactgacaaaattaagtttaccaggtggagtagcgattggagaagtgctactgttttatatgagcaggcagctaatggatttagggttgctaaaagttatgagaaagcaaaagaagcatttgagaaagcttcaaaaggacaagagatgct

SEQ ID NO: 1686 - DNA, 398 bp, Nicotiana tabacum
cacaaaacaaacctcagtcttcttcttcttctgagtccggaactgaagatgggtcaggatccgattccgattccgattcgggtcaatcccaaccttccccttctgcttccgacttcaccgtcaagcccagtatatccgctgcaaaatccccatcaaaaccacttccaagaggcctcaagaaacccaacaacaacaggcccaaaaagaaaaacaatcaaggcccaataaaaagcccaagatttctgaagaagatagtaaggtttctgaggagaagaaatcagctgctactacacctagcaggctatggagtgatgaagatcagcttgctatacctcaaaggtatggctgaattcaaagcccaaaaaggttctgaaccaaatgcaactgatatgtctgct

SEQ ID NO: 1687 - DNA, 312 bp, Nicotiana tabacum
ttttaatggaaaaaacttgcaaagtagaaggtatttcacgctcataacatgctgaaatgaagggaaaataccaatactaaggaactgaaatagcgtatttcttttttatacacaaattttcagaagggaatattctactttgagaaatagccctcagtccgtcccttgaatccaatttgtccaaaagttaggcagatgaacaagcccaagtgccagcacaccaaccatagccagaactgagaagtgagagcaggtccagtggggaaatgagagagttcagtgccaatgctatcaaagaaaagcccactcaaa

SEQ ID NO: 1688 - DNA, 271 bp, Nicotiana tabacum
cttaagcttaggtcttggcctaaacaaagtggcaggaaaggttttcagaataggacatcttggcaacttgaatgagttgcaactattgggatgtcttgctggagtggaaatggtacttaaggatgttggttatccagtgaagtttggtagtggagttgcagctgctagtactttcctccaaaattccactccccttatcccatccagaatttaattcaattattataagtatacaaaaccaatgcttgtaattatttcttttcatgtcact

SEQ ID NO: 1689 - DNA, 216 bp, Nicotiana tabacum
gtcactgtacgtattgccagaagactcactcacaacgtccaaggactcacaagccttcagagagttggaattggactagtactctccgttgctggtatggtacgcttcagctttggtagaacgactaaggagggaccgtgccatccatgacaacttcaaaataagatgctttttggttagtccctccaattcttcattgtaggtgccggggaagct

SEQ ID NO: 1690 - DNA, 286 bp, Nicotiana tabacum
ttttaacaacaagaatagtagtaatattcattcacagtagaagacaacaacttcattattaacaacgtaaccatcatgtacatcaaacaaggatatggaattagggtcacttctttgaagcatgctctcctaccttctgctcgaaaaggcttccatcatagactgctcttacggtttctttcgtcagtatgccatccttggtttttgcctaaatcatataaagaattccaatctacagaagcatttgcccatccgaagtagtcctttgggttctcttttagccttg

SEQ ID NO: 1691 - DNA, 119 bp, Nicotiana tabacum
gagagagagagagagaggggataattgaaagtttaaaagtagtccaaaaatggaaggtgaaaaggaaaggattaaaatggcaagtgataagtacaggaaattcctgcatgaagaacaag

SEQ ID NO: 1692 - DNA, 417 bp, Nicotiana tabacum
gtttcatagtgtgcacccaatggctgaataccatggagcagcgcgggctgttggaggctgtgctatttatgtcagtgacaagcctggacagcacgattttaatcttttaaagaagcttgttcttccagatggttccatattacgcgccaaacttcctggaaggccaactagagactgcttgttttctgatccagcaagagatgggataagtctattgaagatttggaatctgaatgatttcaatggagtagttggtgtgtttaactgtcaaggagctgggtggtgtaaggtcggcaagaagaatctaatccacgattatcaaccagagacgataactgggattgtccgtgctaatgatgtcgactacttacctaggattgctcatgatggatggactggggatgccattctctaatt

SEQ ID NO: 1693 - DNA, 352 bp, Nicotiana tabacum
ttcaagcagctcgtgaaggcatcgttcttctcaaaaacgttgggcgggctctgccactgtccccacaacgccaccggaccgttgctgttattggacccaattcagatgctactgttaccatgattggcaattatgctggtgttccatgtggctatatttctccattacaaggaatagcaagatatgcaaggacagttcaccagcgtggatgcatgggggtggcttgtccagggaaccaacaatttggagtagcggaagtggcagtgaggcatgccgacgccactgtcttggtgatggggcttgatcaaaccatcgaagccgaagctagggaccgagttagccttcttctgcc

SEQ ID NO: 1694 - DNA, 462 bp, Nicotiana tabacum
atgaaatgaagatcagagatgataaagtagaaaaggaaatggaagcagctgtagtggatggaaatggaaaagaaaaaggccacatcattgtaacaactattggggggaaaaatggcgagcctaagcagaccattagttacatggccgagcgtgtcgttggacagggttcctttggaattgtgttccaggccaaatgtcttgaaactggagaaactgtggcaataaaaaaggttttacaggataagagatacaagaatcgggaattgcaaacaatacgccttcttgatcatcctaatgttgtttcactgaggcattgcttcttttcaaccacagaaaaggatgagctttatctaaatttggttcttgaatatgtacctgagactgtataccgtgtgttgagacattacagcaaagcaacccaaaggatgcctatgatttatgtcaagctctatacatatcaga

SEQ ID NO: 1695 - DNA, 445 bp, Nicotiana tabacum
ttttacatggcttttgatattttatataatcacccggagacattttcgctaacaaactaagaaaaataacgaggcttattaagcctttaggctgcagagctccctacattttcacgcttatataatgaaatatttcatgaatgcacaacatctgcatgctaccgtatgttttcagttacctgtatatgactagcaggattgagctgagaaattttgagaacaaaaaagaaaaaggaagagaaagaaaagacgacgataactaactaatcttaaaagaacagtgactgactaatttttcaaccaacaaatatcttctatgactcaacgatagctgcggtaagcggggctgtacatacagctctctgcatatgctactaggttcgcaggttccggtagacgagtggccaaacctagttcatatgctttagctgccactttggcagct

SEQ ID NO: 1696 - DNA, 481 bp, Nicotiana tabacum
ttttagaaaggatgtaattcgaccatttcaaattaaccatgtctttgttaccagaagcaacaaaaaggacaaaacaaccgagaaggctaattaattgtcacatttgattgatatttgaacgtgcactaattacaatcttttacctcattgtttcagtccccagcaaacactgtttatatctcgatatattaacaaggatcttctatatgctaccacatccggcatgcggctcgccaaatctcgtgggatacgcccacagcttgaagagtgagccatcaactgagtcatctgaatcactatcactatctgaggaaggtatggattcctctattacgtagtccacaatctgtttaattgacacaggcatgatctgatgttcatcagaaattttcccaaagcattcattggaacacttggaattactcagccaaacaattgaattgcactgcttgcaaaagcccctctgggatgttatctttct

SEQ ID NO: 1697 - DNA, 274 bp, Nicotiana tabacum
cgcgatcccatagatcacaatcacacaattcacacattaactttattcatagcccctggtccctgcgtcgcaaagggattcaacaaaacagaccataaaattacatagtatcgactaaaagtccgtttccaaaagacctctggtttccgcaatcaagattgtcaccaggactaacaccaagaatactgcaatacctcctgtaaaacccaatgcgatcctggacccttgagtcagtgccacgaccacattccaagccaccattgatgatgttcgt

SEQ ID NO: 1698 - DNA, 354 bp, Nicotiana tabacum
ttttacaaatacaaatgcaacctaaatgtttttagctccgaataatggttctcaacaacagtctaattctgtttgcttttgctctttcttcttctacaggggagcaattaactcaacctgcaggcaatggtacaaatatcaactatattcagacacaaatcctttccaacacgacacatggagacaaccgaatctggaagggtaaaaaattactaagttataacatgcaccgccgtcagaggaaacctccatcagtccatttggaatctgattttccaccatgaatggcatgtttggtaccggatgcactctggtagtgattatcaaatccatcatcctgaccatcatcccatc

SEQ ID NO: 1699 - DNA, 355 bp, Nicotiana tabacum
cctcgtgccgagaaaatgagtggcgcatcaccaaatgaaggacgtgccgttcgtcctgctactggaatctccatatctgattcaaggagtaatagaagttcggattttggtgcgggtaatcgtgctctatcagttaggacccgcaggtcaatgaatgtgaatactaggttgcgggattctttacaggagtcattgcagaccagccaaaatttacctcagcctgaaactccaactctagataatcctagttcgtccagtcaatttttcacagattcttcatcaagtgaatttagtgcttatagtttacctagaaacgacgatgacgatgatgatgatgagttacctggtgtagtgc

SEQ ID NO: 1700 - DNA, 318 bp, Nicotiana tabacum
ttttcacattcggacttgaaattaaaaaggatagaagtaagacgccaggtgttcgattgaataaaataactaacaaattgcgaataacatgtaagcacacttgcaattgtcaagcagtaaaattctgcttatagtgttagtttgcataataaagattcccaactcctttactagtaatctacctcctaccacagatagcaacattcctgacaatgtcatggtttttaccaggggagagtaggccctgttaatttcttgaagcatacccaattactgctgtgcacattggactctctgtgcaccaccaggcatatcatc

SEQ ID NO: 1701 - DNA, 387 bp, Nicotiana tabacum
tctgataccaacataacatgtaagaatgctaagatcagcttcagcctaataactaattatgctgtccgggccacgggccatgggcttcatacacttggggtgtacctcataaccacactcaaggcattggtaagcccatccataaccctgctcatcacaatcacaacagataaaagctccacgcccatgtccttctggtactaaagtaagttcgtggcgatggcccgaatggtgttctgtcttaggaaggccttttgctacttcatccatttgcttctctagtattcctactcttgtctttgtgaaagggtaagcattctctttatacaagttgataaggctcctaccttgtttggtcactgttttgccgtcagggcccaaaaccaa

SEQ ID NO: 1702 - DNA, 496 bp, Nicotiana tabacum
cctcgtgccctcctcaaagatttctcgtatctcttttcattgattaattttcagctttttattcattcaatcttctgtcataaaattgtaataaaaaagattaatttggaaaatataatggctgggatgtgttgtggtgttaatttaactgaaacagaagctacaactccagttgagccaagttcagaagctgcaagacgacgtcgtatggagattcatcagttccgtttagctccaccgttggaaaacggaacgaaacgacacaaagtggagaaagttgtagatcaaagcaagagacggaagttggaaactagtgtgacgatttcattgatgtctccgttgggtgtaacggagaaggtagcagagaaagaatttgacgctaaacctttggatctgtcggaatctgatgtttcgtctgttaaagttgatggtgttgaggttgttgctggtgataataatctgtctaagtttggtataacttctgtatgtggaagac

SEQ ID NO: 1703 - DNA, 491 bp, Nicotiana tabacum
ctaatacctgcacctgttcttaagaaaagaagctcgtgcttgaatgggaaaaaacataataaatatagcaattgtaattgcttaactgcagaacagtcattgttgctcgagtgcaaagactcaaccgaatgtaagactttaactatgagtgagaaagctctgcactcaagcaaggttgcacaatgcaccaccggtaaagggatcgcaagtttccctatagatgcttcagatttggccaactttctaacaatggacaggcatataggatttaattgcaatgcaccagatcttataaagtcggtactcgcggagaaacaagaactatgtttttctgttatctcattgctgtggcacaagttaattgcatcacctgaaacacaaccgagtgcagaaagcacttccgctcagcagggatggagacaggtcgttgacgcactatgcaacgtcgtatcagcattgcctgcaaaagctgcaacagccattgttcttca

SEQ ID NO: 1704 - DNA, 546 bp, Nicotiana tabacum
caagtcttcccatcatgtctacctcacataaacataatactcctcaaatggctgctatcacactcctaggattactacttgttgccagcagcattgacatagcaggggctcaatcgataggtgtttgctatggaatgttaggcaacaacttgccaaatcattgggaagttatacagctctacaagtcaagaaacataggaagactgaggctttatgatccaaatcatggagctttacaagcattaaaaggctcaaatattgaagttatgttaggacttcccaattcagatgtgaagcacattgcttccggaatggaacatgcaagatggtgggtacagaaaaatgttaaagatttctggccagatgttaagattaagtatattgctgttgggaatgaaatcagccctgtcactggcacatcttacctaacctcatttcttactcctgctatggtaaatatttacaaagcaattggtgaagctggtttgggaaacaacatcaaggtctcaacttctgtagacatgaccttgaattggaaactcttat

SEQ ID NO: 1705 - DNA, 413 bp, Nicotiana tabacum
ttttaagaagaagctgaaattttattattagtttcaacaactattacattcagcttgaaaaggcccttagtaaggtaacctttttcctacaaacatttcattcttactaatcactaccttgtcagatacaaaaacgcacttgaaaccatgctttacaagaagtccagtaaagactaagttcttcctaatctcgggaacatgaaggacgttgttcaaagtcatgaccttgccagaagtcatcttgagaaatatcttaccgtatccttcaatgtttgttgtagcagcatttcccatagagagcttctcttcgggtccagcagaagcatatatagaaaatacttccctcacggcacaaacatggtgagtggctccagaatcaatccaccactcctttgggtttcctaccaggttgc

SEQ ID NO: 1706 - DNA, 419 bp, Nicotiana tabacum
catagaagaagaggagagagatagctgattctattcatgttctgcaattgagaattttatacaaaaattaagattatgagatctgtaattgctcctaacaagtggaactagctaacggatgaacttaagttagctgaaattgacgccaaatgaaatacaagccaaatttttgtgcctcagtaattttatataaagtatgatttgcagtacttattttacagtaaaggtgctgactgctgatcgtgctggctgcgcctttctggtcaaggaatcggaaatatttaaagggatagaaagtgaagatcctctaattggtgccgtcaagccaaagaaatgaattgatacagaggagtatatactacggagttctgccgataaatcgagtcccatggcctataataacgtggaggatactggga

SEQ ID NO: 1707 - DNA, 453 bp, Nicotiana tabacum
tttttattcaaacttccatgcattagcttaaaaaagatgacattattacatgcagatatatttctcctataccgactaaaatcttacttctcatcgagtttgcacataggtaggatcatacatggcaaaagttacaaggtaatactcatatttaggggacagtaggatgtaattcgcgacacgcattgcaaacttataatgtgggaggaatccatatatagccatgagtttgaacgtaaccgacattttgcagcaactcatctgcttcagcaggacctctgctgcccggcttgtatggaattggcttgatctctccatcgtcaattctatgcaaaagtggggtaaaaatctcccaagcggccttgagctcatctctgcgcacaaaatgctgctgatcccctcttattgtgtcgagaatcagacgttcataagcctctggaatgacaacccctt

SEQ ID NO: 1708 - DNA, 476 bp, Nicotiana tabacum
attaaggaatcaatatgacaatctgaaatcagattacaataatctcctcaaggaaaaggaaaatcttagagctgaggttttccagctcaacgataagctgcttctcaatgagaaagaaaatgggcaattgactcaacgcgacttccagaaacactccgattcatcgccaaaagaaaccatggctgatcctatttcaagggttaaaatgtccaatgtgtcagctcgggttcttaaggaagatctaagctctgctaagagtgatgtcttaggatcagaaagcccacattacactgatggggtgcattcctctttcgtaaagcaaggtgattcttatgtagttgaacctgaaccgtcagatttatctcaagatgatgaagagaacttcaacaagacaatgctctctactgccaacttgcttgcaaaagccgaggatgatgattatcgcgtgacatcctcaaatgtgagctactttggat

SEQ ID NO: 1709 - DNA, 387 bp, Nicotiana tabacum
gcgatctactatgtttcactatactttgttttaatggcaatctatgttgccttgtagctttagttttttttttctttaattactttgatttcatgtgtttcccaaagttatggtagtttttgatctcctcagtgatgagcaaaacagatgacgagtctgattgaaatccattcaacttaaatcgtgaggacaatacgaggcatttgtctgagaggaactccctactacatttcacccctcttcttctttgctctgctaaattttttttccattcattaacttttaagtttttccttcaaattttagataattctggtgactattgctaaatatttatgtctctttgaggacagccggtaaaataaatctgcagattacatattaaaa

SEQ ID NO: 1710 - DNA, 397 bp, Nicotiana tabacum
gtactacacaacacaagtcacaaaggttaaaggatctccatttatgattgattgtacaggccaaccaattctaaaggacagaagtagggggttggttacctgggaaaggtgaaatgacgaggttgccacttgggtcgtcgccgattgacatcgccggtccgacgaccaactggtgggaccagatcaatgagtccgttcagtggcaagatgggattttttactctctttgtgcttcctatgctcttgtctcagccgttgcccttattcaattaataaggatcgaattgagggtacccgagtatggttggacaacacaaaaggttttccatctgatgaactttgttgtaaatggagttcgtgcaattgtctttggatttcacaaacaagtgtttctctt

SEQ ID NO: 1711 - DNA, 441 bp, Nicotiana tabacum
aagtctagattccaagatcacaggaacaggaaacttaggatgtgtagtgagcccataatgttcttccacacttatatcttctggcttcataccttcaggtaatttccagttgaatccatgcaacatgttggctaatgttactcggataaccttaagtccaaggctatagccagggcacctccttcgccccgatgccaaatggcaagataagcaaagttatgtccgtccatatcaatgtcgttctctaaaaatctctcggggatgaaactcttgtgctctatcccagtattttgggtcccttcccaatggtccaaacattcaccagaaaggtcgttcctttctgtatgtcataaccagccacgttacaatcttctatagcacaatgcggtgctagcatagttcctagaggatgtaaccttagtgtttccttgaggattgctt

SEQ ID NO: 1712 - DNA, 427 bp, Nicotiana tabacum
gaatcaaattccgtccaattctcgccggtagatctctcaatattccggcgacttccgtctgcttttagtctccatgaatccagaatatgactacctgttcaagcttctgcttatcggtgattctggtgttgggaagtcatgtctccttttaagatttgctgatgacacatatcaggagagctacataagcacaattggagttgattttaaaatccggacagtggagcaagatgggaagaccattaagcttcagatttgggatactgctggacaagagcgttttaggactatcactagcagctactatcgtggagcccatggcataataattactctagtggtgtgaatcactagtgaattccgcggccgcctgcaggtccgaccatatgggagagctcccaacgcgttggatgcatagcttgagtat

SEQ ID NO: 1713 - DNA, 216 bp, Nicotiana tabacum
gtcagatccgtactcacacgttaaacctcagatatttgcctttgctcgtcattgatgacgacttcattttgttttcttccccacgaaaatggtagatatgatatggagggacgtagggaagaattactgggacaaacctagtgagtgaaaatggaaacagttgaaatgatagtaaaagtatcttgtgctgccataataattactctagtggtgtga

SEQ ID NO: 1714 - DNA, 204 bp, Nicotiana tabacum
gcaaataagatagatatgttccgttaatcttaatcacatagagcaactgtaacacaatttgcttgcaacacttttcacgtagaagactgctaaatacaaactgaacagagagagatcaacttgagaagaaaaacactgccctttcaagtcctgatcacagtaacagcatcttgtgctgccataataattactctagtggtgtga

SEQ ID NO: 1715 - DNA, 293 bp, Nicotiana tabacum
aatttacttgcgtgatcatatcgtccacccaatcatagatcagcgccatgatgcagaaggactccaacctgtaaatgatgactacgagcagttaatcgagcgtatgttagagcacgacacaattatctttgctacaccgctatactggtatggaatgagcggtcatatgaaaaacttcgtcgatcgctggtcacaaagcttacgtgatacatctcttcatttcaaagaaaaaatgaaagggaaaaaaatgtacgttgtcatcgttggcggagacaatccaaagctgaaagcat

SEQ ID NO: 1716 - DNA, 486 bp, Nicotiana tabacum
taattgaaattggtgacaggacgaagattacggcaggctgtaaattcatcaaccatgatggtgcaatgtacgtgatccgaagcatggaaaagtatgaagatgcccggaattttggcagaataaaactcggaaagaattgttttgtaggaaataactgtatttttcttcccggctcacaaatgggcgatcaattgtattttgggcgcaggatctgtactgaattccagtatgcccaataattccgtttatgcgggaacccctgcaaaattcatttgtactgttgaagaatacggcgataaagctttggaaaataatgtaatgtaccccagagaactggaacccgacagagcaaagcttgaagcatatattaaagaacacatccctcatgtttacaaacccgtaaaaaaataaatggctgaaaaaaagaaaatcctcattcgtataggctcactgcgacacggcggcgcggagaaagttctggtgaca

SEQ ID NO: 1717 - DNA, 470 bp, Nicotiana tabacum
ttaaaggtctgttcgccgtgggtgaatgttcctctgttggtctgcacggtgcaaaccgtctgggttctaactccctggcggaactggtggtcttcggccgtctggccggtgaacaagcgacagagcgtgcagcaactgccggtaatggcaacgaagcggcaattgaagcgcaggcagctggcgttgaacaacgtctgaaagaactggttaaccaggatggcggcgaaaactgggcgaagatccgtgacgaaatgggcctggctatggaagaaggctgcggtatctaccgtacgccggaactgatgcagaaaaccatcgacaagctggcagagctgcaggaacgcttcaagcgcgtgcgcatcaccgacacttccagcgtgttcaacaccgacctgctctacaccattgaactgggccacggtctgaacgttgctgaatgtatggcgcactccgcaatggcacgtaaagag

SEQ ID NO: 1718 - DNA, 480 bp, Nicotiana tabacum
tgaagattcggattgatacattttgcccaaatctgaaatgtggaaagccattttccactttctctgtaaaaatctttctgaagagtagaatagtgatctgccatataacaaaggtagtaaatcttgtattttaagttgaatttaattataatccgtctaaaattgaagtaattttgttcacggaattttcaagattgaaaggcatttcataatctttcagcttctccgaatatttatcaaaaaattcaggttgagataatgcttttttcattccgtcataaattccttcatccgagttttcaacaattaaccccaattctccattattcagcatttcgttcgctccggaaacttcagtggaaataattttctttttcagggtgattgcttcaaagagaacggttgggaatccttcatatcttgagcttataaatataaaaatccgcttttttgaagtatggataaggattatctgtaaaa

SEQ ID NO: 1719 - DNA, 521 bp, Nicotiana tabacum
aatgaagattcggattgatacattttgcccaaatctgaaatgtggaaagccattttccactttctctgtgaaaatctttctgaagagtagaatagtgatctgccatataacaaaggtagtaaatcttgtattttaagttgaatttaattataatccgtctaaaattaagtaattttgttcacggaattttcaagattgaaaggcatttcataatctttcagcttctccgaatatttatcaaaaaattcaggttgagataatgcttttttcattccgtcataaattccttcatccgagttttcaacaattaaccccaattctccattattcagcatttcgttcgctccggaaacttcagtggaaataattttctttttcagggtgattgcttcaaagagaacggttgggaatccttcatatcttgagcttaaaatataaaaatccgcttttttgaagtatggataaagattatctgtaaaacccagcatggttgctgtttcatcaacaccaagatcggactt

SEQ ID NO: 1720 - DNA, 419 bp, Nicotiana tabacum
ttttagagaattttgctatcctataaaagtatgtatgttattacattctacttttactatgtgacttttacatgacatttaaaaaataccaaaaattaaccgaaccataccgataccaaagaaaaaccgatatgattgggacgatttcgaaaagtctaattttgattatacaaaatagaataaccgaaaaaatggtatagtacaaattttatgaaataatcggccgaaccgaacaattgacaccccttttagctccgcatcaggtggtacaacaaacttcttctcattaatattctgtaatttaccaagtctaaagctaccacaaccacctctcactcttttttttatcttccgggcaagtttaacttttattgcaacgactgttttcgtctttccttttttcttcacaaatggacatt

SEQ ID NO: 1721 - DNA, 399 bp, Nicotiana tabacum
tacgactcctcttctttagacaatccaaaatggttctccaaactgaaagctaccccgctcttggcttctagcagcaacaaagctactataacgggaacgacttctactcctctgaggacaaatataacagcaactacggctcaagcatgcaaatgacaaagccttatggttatcccagcgtaaccactcctcagcacacccaacatcacatgatgataagccaaggcggctatagccacgacgatgatagctggtacaacaaagacaagtaccaaagtggctatggccaccacaatagccatggccaatatgggcacatgtcccatgattcctcaaacttttacagcgataatagtggctatggaagtggaatgcagcactctagttcacacatcgacg

SEQ ID NO: 1722 - DNA, 401 bp, Nicotiana tabacum
ctttaataaatattctatagtttgtccgttgaaatccataactaagattgtagatacgtaaattccttaattctctcccataataagaacaaacgttcagtccatttggaactttgtcccttcttgggtctatctggcatcttcgagcagaaccatttgaagaaaccaaggcaacatttgcaacaagtgaatcttccttttgctacttcagtttttgagacagatatctgggtctaattcaagtttgttcgtttatgaattaattatgggatgacaaatttggacagctaaaagtgactgttgtaaaaggcaggcgtttggtgattcgggacttcaacagcagtgatccttatgtcattctcaagctgggtaatcagtggcgttttattctccatgaatca

SEQ ID NO: 1723 - DNA, 190 bp, Nicotiana tabacum
gtgagtgtgtgaagtgcaaagccgccgcgttcgagaactgggtgtccggcatttggttgaatggctggccagatagtgtaaggacagttgttaactagggttagaattaaaccagagtaagtggcttgagagagagcacaaagggttaaaaagagagagagtgaaagtaaagtttttgtagatgaagaag

SEQ ID NO: 1724 - DNA, 236 bp, Nicotiana tabacum
gaatattaaacagtgtcttgtcttttcttttacaacatggctgtcaaaaataaggttagtaatggcaatctgaaaggaggaaatgtgaaaacagatggagttaaggaggttcactacagaggtgtaaggaagatggccatggggtcggtatgcagctgaaatccgtgacccgggtaagaagagtcgggtctggttaggtactttcgacacggcggaagaggcggctaaggcgtacg

SEQ ID NO: 1725 - DNA, 232 bp, Nicotiana tabacum
ttttcccatcaaatattaatgtatttccagtattgtaacttcacaatgccgtactgatatgtaagatatgtaaatgctagctactgcttaatgacaaaaatggccgcgaaagaggattggggtatgtttgtcacatttcacgtgtgagcttgctgcggctgctcctgaacaataagaaaatagaaattggaaaaactaaactctgaagtttcaaccaccactaacctcacac

SEQ ID NO: 1726 - DNA, 313 bp, Nicotiana tabacum
gggactatggagtcgctgatggcaacattttgcatttggttcttcgtctgtctgatttacaagcaattactgttaggacagtgtgtggtcaggagtttgagttccatgtggagagaaagagaaatgttggttatgtgaaacagcagattgcaaagaaggggaaggggttttgcaatctaaaggagcaggaactaatatttgatggtgaagaataagaagataagaggctgatagatgatatttgtaaaagctacgatgcggttcttcactttgctggtgcgtaaatcagctaaagtacaggctagagcagtgc

SEQ ID NO: 1727 - DNA, 447 bp, Nicotiana tabacum
attttatcagggtcacaagaatactagcagcttgcatccagtgttcaaaggtcaaagcttggttctattgggagacagagagaaatccaattacaataatgagaagaatttaggagtttatgagatggaagtgaagctttacatgcgtatcaggctaaaggctggttggatcaaaacacacaaaattaagccaaagattgagtgtgatttcaaggttcctctggagtctaatggcagatcatcatctgctaatttcgaggaaactagatgccatcttgattggtagttttcttctatcatcgcaccattattgatcgtcttcacacttcgcctcctttgccgcgaatcactagtgaattcgcggccgcctgcaggtcgaccatatgggagagctcccaacgcgttggatgcatagcttgagtattctatagtgtcacctaaatagct

SEQ ID NO: 1728 - DNA, 354 bp, Nicotiana tabacum
gcttgttgatgcaatatcgaggcgatattccccttgtcagcgatccggcctaccatcatttttggtgcggatgtcacccaccctcaccctggggatggattctagcccatccattgccgcggtggttgcttctcgagattggcctgagattacaaagtatgctggtctagtttctgctcaagcccataggcaagatgcttattcaggatctgtacacgatctaggcaagatcctgttaaggggacagtggctggtggcatgattaaggacttacttatatccttccgaagatgctactggacaaaagcctcagagaatcattttctacagggatggcgtagtgaaggacaattt

SEQ ID NO: 1729 - DNA, 326 bp, Nicotiana tabacum
caaagctattgaggtctttaaaaatgtcagaaaacctcaagaaaacaacattaaagagtaggcatataataaaccaaaacttaagcaagtatgcccaacagcttccagaaaagaagcactaaatccagacattgtcctaaaagtaaattgtttaggcaactcaattgcaataaggaaaaagatatgtcgcagcaaaataacaagatagtcaataactttagctatacaagtcatcatcatcagctccagcattagaagttgcaaaggggtcagttgcatcagccccaccacttgcctcagcaaaccgaaattcagttccaaaacct

SEQ ID NO: 1730 - DNA, 347 bp, Nicotiana tabacum
gcacaaccctacacccaatactaaattttggaaagtgggttgcatttttgtattccgtgattccttttatctcttcctctttttctcctttttcttcttcctttaggtatatacccatatatagcctataaaccatatagctatataaaaactctacatctattttgagaatttgatgatttgggtcggctaaaaatacaatcttcttaatacccttcccgaaatcttggcacaaatttgtgagatggagacgcagaacctggaacgtggacatgtaattgaggtacgttgtgacatggcagctcaagaaaaggggactaaaatctgtggttcagcaccgtgtggat

SEQ ID NO: 1731 - DNA, 323 bp, Nicotiana tabacum
gcacaaccctacacccaatactaaattttggaaagtgggttgcatttttgtattccgtgattccttttatctcttcctctttttctcctttttcttcttcctttaggtatatacccatatatagcctataaaccatatagctatataaaaactctacatctattttgagaatttgatgatttgggtcggctaaaaatacaatcttcttaatacccttttgaaatcttggcacaaatttgtgagatggagacgcagaacctggaacgtggacatgtaattgaggtacgttgtgacatggcagctcaagaaaaggggacaaaatc

SEQ ID NO: 1732 - DNA, 373 bp, Nicotiana tabacum
cttcaaccaagttgttatatttgtcaagagtgtaaatcgggcagcacagctggataaattactagtggagtgtaattttccatctatctgcatccactctggcatgacgcaggaagaaagattgactcgctacaagggtttcaaggagggtcacaagagaattcttgtcgcaactgatctggttggtaggggcattgacatcgaaagggtcaacattgttattaactatgacatgccagattctgcagacacttatcttcacagagtgggtcgagctggtaggtttggaactaaaggccttgccatcacatttgtgtcatctgcatccagattctgatgttctaaatcaggttcaagaaaggtttgaagtaga

SEQ ID NO: 1733 - DNA, 403 bp, Nicotiana tabacum
gctctctttatacactgctctgggaggcattcgtccgtcagcttgcttgcccattaccattgatgtgggtacaaacaacgaggatttgttgaacgatgaattttacattggactcaggcaaagaagagctagaggacaggaatatgccgaactttttgatgaatttatgtatgctgtcaagcagaattatggggagaaagtgctcattcagtttgaagactttgcaaatcataatgcatttgacctccttgcaaaatacggaactagccaccttgttttcaatgatgacatacagggaacggcatctgtggtcctcgcagggctcatggcatcatttgcaattggttggaggaaccttggctgaacatacattcttattccttggagcaggggaggctggaac

SEQ ID NO: 1734 - DNA, 332 bp, Nicotiana tabacum
cttgttccttattatcttgatgaacaaacaggatgggggcttgagatctcagaacttgagcaacagctgaaaactgcaaaatccaagggtattgatgttagggctttggttgtgatcaatccaggcaaccctactgggcaggttcttggtgaggccaatcaacgggaaattgtagagttctgcaagagggaaggccttgtccttctggctgatgaagtctatcaagataaatgtttacgtgcctgacaagaaattccactcatttaaaaaaatttcccgctctatgggatatggtgaaaaggatatatctttagtgtctttccagtccgtgt

SEQ ID NO: 1735 - DNA, 346 bp, Nicotiana tabacum
ctgaaattgaagattattttgttgattcacctcctgttattgacgatgacagccggaagttaccaaaacttgacgatgacaacagcagactacattcgaactggtttaactccaagatggagtgacttagatgttaaccagcatgttaataatgtcaagtacattggctggattcttgagagtgcacccatgcaaatactggaaggctgcgagctcgcggccatgacattggagtaccgaagggaatgccagaagggacagtgtgctgcagtcactgaccctctgtactggacaagggtgtcggtgacttggatgacattgggaatgttcagtgtcaacatttgct

SEQ ID NO: 1736 - DNA, 410 bp, Nicotiana tabacum
ctttaactctgaagaagcaactttcatttatttaggaagaatacaaattgaaagaacactaacaaggaaaaagaaaaaaaaaacagaggttgcacaatcatctctggctgaaggcgcaccgccacttctaatccaccgcaagcaccatgtaaccaaaagccaacaaggattacacaagctctaggacaagggccgaggcacctcctccgccattgcaaacaccagcagcgccatatttgccgtttttctgtctcaataccccaagaagtgtaaccaatatacgagctccactgcatccaagagggtgccccaaagatacagctccaccatgtacattaactttttctggattaagaccaagcagcttttgatttgcaagagataccacagcaaaagcttcattaatttca

SEQ ID NO: 1737 - DNA, 328 bp, Nicotiana tabacum
tacagatcgcacgttctgtttgtcaactactatcagtagataatctcaacaggaatatatacatcactggatggattttccttccattaaaaatgtgaattatttatgtaaaagaaattctacgcagttaaatggccgttttaggatgttgtagtgcaatctatgtctaccaagctcttcaaaggctaaagaaatttttatgtctcaactgtcttcaactttgcagctgctcggatgagggtggctgcaaatgaaaaggcagaggctgagaagattttacaaattaaaagggctgaaggagaggcagagtcaatgtatctctcagggt

SEQ ID NO: 1738 - DNA, 388 bp, Nicotiana tabacum
gatttgggctgattatgggcctcattatgttaaagtaaggaagctctgtaatcttgagctttttactcctaaaagacttgaagctcttagacctattagagaagacgaagttactgccatggttgaaaacattttcaaggattgtactaagcctgataacacaggtaaaagcctgttgatgagggagtacttgggatcagtagcattcaacaacattacaaggttaacatttggtaaaaggttcatgaactcaaaaggtgagattgatgatacaaggtcaggaatttaagggcattgtctctaatggcatcaaaattggcggaaagcttcccttggcagagtatgttccatggctccgttggttttttcacaatggaaaacgaggcac

SEQ ID NO: 1739 - DNA, 432 bp, Nicotiana tabacum
ctggaattgccatgcacaagaaaaacgaactttgccttgtcccaaaaaattatttataaattatattgggacgtggatctcatgctagttctgtgcggtcagctaagcttaaatcactagtgaattcgcggccgcctgcaggtcgaccatatgggagagctcccaacgcgttggatgcatagcttgagtattctatagtgtcacctaaatagcttggcgtaatcatggtcatagctgtttcctgtgtgaaattgttatccgctcacaattccacacaacatacgagccggaagcataaagtgtaaagcctggggtgcctaatgagtgagctaactcacattaattgcgttgcgctcactgcccgctttccagtcgggaaacctgtcgtgccagctgcattaatgaatcggccaacgcgcggggagaggcggt

SEQ ID NO: 1740 - DNA, 470 bp, Nicotiana tabacum
ctttctttctccatcgctataagtaaaaggttcaattttgggatttcagggtttgctattggacaatctttgaggaggagctagattaagaggcttttgtgaagatgtgggcagcttcttgccttgcgtcatgctgcgcggcgtgcgcttgtgacgcttgtcgtacggtagtgtcagggatcagccgtcgttccgccaggattgcctattgtggtcttttcgctttgtcactcattgtctcgtggattcttagagaggttgctgctcctttaatggagaaaataccatggattaatagctttgattcgacaccgaacagagagtggtttgagacagatgctgtgcttcgggttagtctggggaacttcctatttttcactatcttagcaatcttaatgattggtgtgaagaaccagaaagacccgcgtgacagcatgcaccatggaggttggatgatgaaaatcatttgg

SEQ ID NO: 1741 - DNA, 489 bp, Nicotiana tabacum
attgaccctatttacagactttgttgctgtctttgtgcgtattctgatcatcatgctgaagaatgcatctgagaaggaagaagagaagaagaaaaggaggagagactagattgtcatagcttctttaaagaaactatgacaaactctgtgatatgggatctgctttttcatttacttctgtttatctcgacaaacatgttaatagtttggtactagctttagcttagattgtgatacagtgttgtgtggcttgccgcgatggctgcgatggaaacatgtggctatgttttggaattttgacatctgataacaaaagtaattgtgataagcctagaatcactagtgaattcgcggccgcctgcaggtcgaccatatgggagagctcccaacgcgttggatgcatagcttgagtattctatagtgtcacctaaatagcttggcgtaatcatggtcatagcctgtttcctgtgtgaaattgttatccgctca

SEQ ID NO: 1742 - DNA, 541 bp, Nicotiana tabacum
  misc_feature (493)..(493): n = a, t, c, or g
ctcttgcaaatttatgcatgaccgtggagattataagtctggttggcagattgaaaaagagtgggacgaagctgagaaagagaggaaacgtaaattggctatggggatgctcgacgaggatgatgaggatgctgagaagagtgatgatgatgatgatgacgccttaccatttgcttgctttatctgcagagagccttttgttgaccccgttatgaccaaatgcaagcattacttctgtgagcattgtgcattaaagcaccatgcaaagaacaagaagtgttttgtatgcaaccagcccacttgtccagcttcaatcactagtgaattcgcggccgcctgcaggtcgaccatatgggagagctcccaacgcgttggatgcatagcttgagtattctatagtgtcacctaaatagcttggcgtaatcatggtcatagctgtttcctgtgtgaaattgttatccgctcacaattccacacaacatacgagccggangcataaagtgtaaagcctggggtgcctaatgagtgagctaactcacat

SEQ ID NO: 1743 - DNA, 207 bp, Nicotiana tabacum
cctcgtgccgaattcggcacgagggtagctcatgtagtgaaaacaagaaatacggcaaatacttgtcttagataataacacccgtcaaaaagttttgatcgttccatttctttgtaaaatattgttttctactagtatctatcattgtaaacttcaacaagcaaacatggtagtcttgtccaaaccagccccacttgtccagcttca

SEQ ID NO: 1744 - DNA, 461 bp, Nicotiana tabacum
ccacgatatgcatcgactatcactgctaattacactgaaccaaattaagagcatctgagagcagctgattaattacgttaaattattaattcatggtgctacttagcatccaaactctttcctcttcatacccaactctcaataattacacctttaattatcgctctcagcgacaaagccagagccaaaaccagaaccagaaccagaaccagaaccagagacgatgtgtgaaaattcgtagtaatgttatccgatgtgggatagcggaaccatcaggggaaccagccccacttgtccagcttcaatcactagtgaattcgcggccgcctgcaggtcgaccatatgggagagctcccaacgcgttggatgcatagcttgagtattctatagtgtcacctaaatagcttggcgtaatcatggtcatagctgtttcctgtgtgaaattgttatccgctcacaat

SEQ ID NO: 1745 - DNA, 233 bp, Nicotiana tabacum
accatctgggacaacaccgtttgactcaaaccctgctcagccaaaagattttgatcctactggatgggaacttgccctggtcactactcctagcagcgacttatctgcagctcaggagagacaattggctggtggattggactccctcacgctcaatagtttgtatgatgtaggagcatatagagcatctcaacaaccagtatatggacaaccagccccacttgtccagcttc

SEQ ID NO: 1746 - DNA, 282 bp, Nicotiana tabacum
tggtgaagtcgaaatgaggttgatggaaatcaataacggcacttggaaatcaggcatcatcgttaagggcttcgacattcgtcctaactaattggatagatctctacccagtggcctttatgttttctgttttgcatctttgttgtgtttgtctttatcattttctaataaaatcactctttctctatgaaaagagtgagcttgttgtaagtgcatgtgatattatttatgatccatctttattaccttattctgaattataataaaatattttacgatttc

SEQ ID NO: 1747 - DNA, 498 bp, Nicotiana tabacum
ctgaactatagatctgggattcggagcaacttttgaagaagaagaaacttaggttaatcactgaaaaagcagaaaaaaatgtcgtggcaaacatatgtagatgatcacttgctgtgtgagattgaaggtaaccatctcacatctgctgctattattggtcaagacggcaccgtttgggctcaatccgccaattttcctcagttcaagccagaagaaataacaggcataatgaaagactttgttgaaccagccccacttgtccagcttcaatcactagtgaatacgcggccgcctgcaggtcgaccatatgggagagctcccaacgcgttggatgcatagcttgagtattctatagtgtcacctaaatagcttggcgtaatcatggtcatagctgtttcctgtgtgaaatcgttatccgctcacaattccacacaacatacgagccggaagcataaagtgtaaagcctggggtgcctaatgagtgagctaactcacata

SEQ ID NO: 1748 - DNA, 271 bp, Nicotiana tabacum
tgaaaaatcttgatttacataatgtttcaacccgtcatggcgatggatggcaaggttggcaggcacgtgcgccgtttgacgctatcattgttacggcggcaccgccggaaattccaactgcgctaatgacgcagctggacgataggcgggattctcgtcttacccgtaggggaggagcaccagtatttgaaacgggtgcgtcgtcggggaggcgaatttattatcgataccgtggaggccgtgcgctttgtccctttagtgagggttaatt

SEQ ID NO: 1749 - DNA, 226 bp, Nicotiana tabacum
gcaaataagatagatatgttccattaatcttaatcacatagagcaactgtaacacaatttgcttgcaacacttttcacgtagaagactgctaaatacaaactgaacagagagagatcaacttgagaagaaaaacactgccctttcaagtcctgatcacagtaacagcatcttgtgctgccataataattactctagtggtgtgtatatggagagtgctgaattggg

SEQ ID NO: 1750 - DNA, 187 bp, Nicotiana tabacum
gggctttggttggagcgggggctcgtgctcttttttatcccacattgttgtataatgttgtgagaaacaagattgagaccgagtttcgatggtgggatagggttgatgagttcatactgttaggagctgttccatttcctgctgatgtccctcgcttgaaggctctagtggtgtgtatatggagagt

SEQ ID NO: 1751 - DNA, 293 bp, Nicotiana tabacum
gtcattcgtaacggttcacatcacaaatagtcccctttttgatagccagattccatggaaacaaaagttctgtccagcggaatccgccactctactatccctcaaagttatatccgccctcaatccgataggccacgcctctctgaagtcgttgattgcgaaaacgttccagtaattgacatgggctgtggagatagaaaccatataattcgtcaaattggcgaagcctgtcatctttatggttttttccaggtaattaatcatggtgtaccaacgaatttagtagaggaaat

SEQ ID NO: 1752 - DNA, 545 bp, Nicotiana tabacum
tcttcagagctgggacccgacgttaatcaatccttgcacatggtttcatgtcacctgcaacggcgaaaatactgttgtaagagtggacctaggtgctgctaatcttaccgggacactggtacctcagttgggaatgctagccaatcttcaatacttgcaacttgaaaataattcatttagcggagcaatcccaagccaattaggcaacttgacaaggctagtgagtttgggattagacaataacaagctgagtggccctatcccatcatctcttggcaatttaatatctttgcgatggatgagattgaacggtaataaattatcagggaaaattccaatctcagtcttgaagctcatctactggggaaatttgcagctactgaatgtttcagacaataaactagcagggactgtccatcgtgctaaccaaacaggatttgcaattacaacaattgttcaagacgtcaaggcctagatcaggttacttgatcaacgtttggaattggattgtcctgcaaagttgcatttctatattagactgtgtc

SEQ ID NO: 1753 - DNA, 594 bp, Nicotiana tabacum
ataacgcaggaaagaacatgtgagcaaaaggccagcaaaaggccaggaaccgtaaaaaggccgcgttgctggcgtttttccataggctccgcccccctgacgagcatcacaaaaatcgacgctcaagtcagaggtggcgaaacccgacaggactataaagataccaggcgtttccccctggaagctccctcgtgcgctctcctgttccgaccctgccgcttaccggatacctgtccgcctttctcccttcgggaagcgtggcgctttctcatagctcacgctgtaggtatctcagttcggtgtaggtcgttcgctccaagctgggctgtgtgcacgaaccccccgttcagcccgaccgctgcgccttatccggtaactatcgtcttgagtccaacccggtaagacacgacttatcgccactggcagcagccactggtaacaggattagcagagcgaggtatgtaggcggtgctacagagttcttgaagtggtggcctaactacggctacactagaagaacagtatttggtatctgcgctctgctgaagccagttaccttcggaaaaagagttggtagctcttgatccggcaaac

SEQ ID NO: 1754 - DNA, 471 bp, Nicotiana tabacum
cgttcctttgtccgtgcgatagcgcgaaaatcagtgctccaaagctcctgactgaagatggatctccagtcatttatcaggactttacgtatgctgagtattacaagaagttctggagcaggaatttggaccaagaacattgtttggagtgtgcacaatcactagtgaattcgcggccgcctgcaggtcgaccatatgggagagctcccaacgcgttggatgcatagcttgagtattctatagtgtcacctaaatagcttggcgtaatcatggtcatagctgtttcctgtgtgaaattgttatccgctcacaattccacacaacatacgagccggaagcataaagtgtaaagcctggggtgcctaatgagtgagctaactcacattaattgcgttgcgctcactgcccgctttccagtcgggaaacctgtcgtgccagctgcattaatgaatcggccaacgcgcggggaga

SEQ ID NO: 1755 - DNA, 495 bp, Nicotiana tabacum
cttcttcaagacttacaagtagctggtcttcaagttcttaaagatggtaaatggttggctgtcaaacctcagccagatgcctttgtcattaatctcggtgatcaacttcaggcagtgagtaatggaagatacaaaagcgtatggcatcgagctattgtaaattctgataaagccaggttgtcagtggcttcgttcctttgtccgtgcgatagcgcgaaaatcagtgctccaaagctcctgactgaagatggatctccagtcatttatcaggactttacgtatgctgagtattacaagaagttctggagcaggaatttggaccaagaacattgtttggagtgtgcacaatcactagtgaattcgcggccgcctgcaggtcgaccatatgggagagctcccaacgcgttggatgcatagcttgagtattctatagtgtcacctaaatagcttggcgtaatcatggtcatagctgtttcctgtgtgaaattgttattt

SEQ ID NO: 1756 - DNA, 504 bp, Nicotiana tabacum
cttcttcaagacttacaagtagctggtcttcaagttcttaaagatggtaaatggttggctgtcaaacctcagccagatgcctttgtcattaatctcggtgatcaacttcaggcagtgagtaatggaagatacaaaagcgtatggcatcgagctattgtaaattctgataaagccaggttgtcagtggcttcgttcctttgtccgtgcgatagcgcgaaaatcagtgctccaaagctcctgactgaagatggatctccagtcatttatcaggactttacgtatgctgagtattacaagaagttctggagcaggaatttggaccaagaacattgtttggagtgtgcacaatcactagtgaattcgcggccgcctgcaggtcgaccatatgggagagctcccaacgcgttggatgcatagcttgagtattctatagtgtcacctaaatagcttggcgtaatcatggtcatagctgtttcctgtgtgaaattgttatccgctcacaat

SEQ ID NO: 1757 - DNA, 471 bp, Nicotiana tabacum
gcaagagaagatgtccaacaatgctgctgatgagaaaagtagtgagcaatcgcagtcgcagtcgcagtcgcagtcgcagttgcagctgcagtcggaagggtacccaagagggcctctctcttaccctaagcccgaagctgagtaccaacaaattgttcaaaattcccaacttttctggaacaaacttcagcaattctctgcatcccttcctaccaatttccagatccctcttgtagcaggaacaccgctagatctacaccgtctttttattgaggttacgtctcgaggtggaatagaaaaggttattacagagcgaaaatggggggaggtgaaaggaatattcagatttccatcttctgtgaccagtgcatcatttgtcttgcggaagtactatctatccatgctttatcatttcgagcaggtttattactttcggaaagaagaaccttctgtctctgtggctgatcctac

SEQ ID NO: 1758 - DNA, 472 bp, Nicotiana tabacum
ataaattatgcactatggacagattttagcatcatgtattggtacaatgcactccgagtctgcaaaacaacagtatcagttgtttctcataaacgcaaagaatagaaaaaagacacctccacgtgtgttagaataggcatcatgttgagtactcaacgttgcatggaaactatggttcatagtcctgagcatctgcttcaccccttggactagcctgatcaacaccaaatgtcctcttgctcatgtttgctcgttgcactagcctaactaatgcttcagccacttccgacataggtggcctgaactcaggctcgggctggacacagagagctattacatcagcaaagcgtgatagggatttaacaagaatatggcctcagtctcttcaagccaatggcaaaagagtgcctaaattggttaaatcatcaaacaattagctcagtagtgtatgtatcatttggaagtatggcca

SEQ ID NO: 1759 - DNA, 479 bp, Nicotiana tabacum
ttttcagaggagactttgtgatgaaattatggaacgagtatccatagccaacagttacacactggtgatgatgcatccaggagtttctgccactacagttgcacatcttgcatagccttttgcaaatatacaagtatggaagctcataagagtataaaactacaagcttttcatgtcaaaatgtcacatttgattatacatgggaaaaagggatgcattacttaccttatttttccgtcaccacttcatctcttgatgacacagataactcaaccatttacagctacaattacactcacagagactgcagttagaggctcatcccttgttgcataaacaggcacatgttaccttcttgggcgggttactgatgattaattaaaggtattttccctgtgtacttaaggaattaccacactaatccctttcttctcctgaacctgtcaacacgatctgtgctcatccgagacttctcgggt

SEQ ID NO: 1760 - DNA, 535 bp, Nicotiana tabacum
gtttcctaggtacaagtatcattttcctttccttgaaactaatggactagtaactgtggacgacaaccgggttgggccactttacaaacacatttttccaccagcctttgctccaagtctttcatttgttgggctgccttggaaggttataccattccccttgtgtgaattgcaaagcaagtggatcgctggtgttttatctggtcgcatttctctcccatcaaaggaagatatgaatgctgatattgaggctttatactcatccatggaaacctcttgcattccaaaacggtacactcataatatggatgattgtcaggtataacatctgccaaaacttgtcgaatggttgaaggtttctatttctgttctctgtgtcgtcttcttttcctttccttttttacttcatatgcctattcttaacatacagaagttctaggctacaccaccttagttaatttggaaaagaaaaagagaagagaaatgaaactgaagaactagagagtagtaagcttctgtcattatgagcaaacgc

SEQ ID NO: 1761 - DNA, 336 bp, Nicotiana tabacum
aaggctgtgccaagaaagtcagacgtttcattcgccacactgaaggtgtggaagacgtgaaatcggactgtgaaaatggaaatttgacagtaaaagggaacgtggacccctcatggctccgggaaagggtggaaatcaagacgaagaagaaggtggagctgatatcatcgccgcccaaaaaggacggcggcaatggcggcgccggcggagataaaaaatctaatgacaaaacagagaaaaagaaagaggagaagaaggacgaggagaagaaacctaaagagccccaagcaagcactgtggtgttgaagattcggatgcactgtgacgggtgtgcac

SEQ ID NO: 1762 - DNA, 440 bp, Nicotiana tabacum
aattctttcattttttgaacaagaaaaaaatcctctcccccccaaattttcctttacaagttttttcatttctctaaaagatttaaatggatcttgatttgataagggagcatcttcttgatgatgttgtttttatggaaaattattgctcatcatcagaaacaagtagaaccctttattctcaaaactcctctgtttctgaatcatttgattctttaacctctgatctcaaaatggaaaatttctcttctgatcccacaaacttagctcaaagtttgaaccaagaatttaattcttttgaatttgaaccaaaacccaacttagtacctcgtataacaatctcaaattcccccaaaaaaacaagttttaatgaaagaaaaccttctctaaatattacaatacctaatgtcaagaaaacagaggaatcaaaaacagaggag

SEQ ID NO: 1763 - DNA, 493 bp, Nicotiana tabacum
ttttgaaactaaatattgcatgttaatacgaaaccaaaagttccaaattgatattcctaatgaatttctgccactgcagatgacaccaacccttcaccaagctgccacaccattttgcagaggcacgattttcagaggaaaataactctagaaacttgaacaatggagtctagctatataacattagctagcagcagtacgaagaaacaactaagcagaacaatccatttgggtaccagttagaatactaggtatcataatattaagacatttccatcctaatgtaggaacagcataggttcgataagggtacaggaaatccagaagtgccaaagcagaggaagcctccgcgcagttcttcaaattaactggttcaatattcaaccatattgcataaagcagaaacctcaccgccactcccagtcttcagcaaatcaacttcaacatttgctaggcaggcctcagcccactaagatggcatgtatgtagaagt

SEQ ID NO: 1764 - DNA, 381 bp, Nicotiana tabacum
gcgaggattagctttgctgcgcaggtaaataattacaggaatacagtgcaacaagtggtgcaaatactaggagatgaagcttcagctgcaaattatttgagcaagtgcatatactcagttggactgggcagcaacgattatctcaataattatttcatgcccctttattactccactagcagacaattcaatcctgagcaatatgctgatgttcttattcaacagtacactcaacaattgaaggtaagtttacctatttaagttaattctttatttattttcgacaaattaactcacaccatccacacaagtcaactctaattgtgctttcgcgtatttgtgtattgcttcagactttgtatgactatggagcaaggaagt

SEQ ID NO: 1765 - DNA, 387 bp, Nicotiana tabacum
tgcttctagtgcaccagtagtgctgaatgtccagcaagatccgcacttgccctggttcttgactgggctgacaatcccagcttcccgccagtctttcgtctccggcagaacaacgttagtgactttgagattgccctttgtggtggctgaacagttttgatgctgcccccaacctgtctctccggaactcgtcccatgttaggtcggtaaactcattgacaccgagtttgtatgatagtcctttcttgttgtgcgatcgaatcatcttcaaattgtccaaaaatacctcgaacctttgctttatctcctcaactgactcgtacctcttcccatacctgtgagcaaagcgagcgaaggagagagcatggcgggtcttgccgacgactg

SEQ ID NO: 1766 - DNA, 375 bp, Nicotiana tabacum
gggggtgaatagtctcgatgtctacctggatatttccctctgccaaatccacgaccacgtggtgggccaccagaatgatcaaaatcaggactataccgatgatctgcattcctatggcgctcaggtgaaacagaacctgcacgtattctatatccatgagtatcggagaatcgaccggaacgtgaatagggtggtgcatctggacgaacctcgccgggctcgtagtcgctaccaacaccgtcactgtcattatctccgccgctgtcggtgggccttacaactaggctgctcaggtgcagcgttggctggtcctctcgcgaacccatattcttctctctctctcttgccgcactgtgcggagtgtctttttctgtg

SEQ ID NO: 1767 - DNA, 391 bp, Nicotiana tabacum
  misc_feature (151)..(151): n = a, t, c, or g
ggtatgtcatcgtcgtcactctctgcatctctttcttcctcaaatccctctttaatcttatctcctcaaattccaaatccaatcacaaaaacaagaaactcccaccgggaccctacacttttgcggtgatcggaagcttattatgggcgangaagatccttcgctgatttggaaccaatccttcgtaacctcaaggctaagtatggtcctctaatcaccctcaatattgggtctcgtaccgccatattcgtatccagtcactccttagcttaccaagctttagtccaacaaggcgctgttttttccgacaggccaagagctgtccccaccagtgcagtcgtcagcagtaaccagcgtaccatcaactccgccccttacggccccgtttggc

SEQ ID NO: 1768 - DNA, 260 bp, Nicotiana tabacum
ggcggccacgttaatcccgccgttaccttcggtgctttcgttggtggaaacatcactttgtttcgtgggattctctacattattgcacagttgcttggatccactgttgcttgcttcctccttgaatttgccactggtggcatgagcacaggagcatttgcattgtcagctggtgtatcagtatggaatgcttttgtctttgaaatagtgatgacttttggacttgtttacactgtgtatgccactgctattgacccaaa

SEQ ID NO: 1769 - DNA, 473 bp, Nicotiana tabacum
ttttgtttgaaaatacatgtcgttaattataagatcttgcacataatatcgcaagtagctagatcatcaacacatgattcgtaagagtactaaagagttcataataatatcagatcatacatcaagctgaattcatatatcctcccccccttaattaagaccacttggactttttacagatccagttcttcagaggattacaaatattatatacttttaactataagttgctttttagtgcaattatttaagttgtttatatatatcaagcagaagtccatacatatataacgtgaaatggacattcatttcaattagtatggactttggcctatgacattacctggaggatcatagttgcaagagacaacatatcctccattgttgcacttaaccctagcacatccaacacgaaaccgagttacgccaaaccacctgagtatagtgtccacacacctgtccttgtgcacaag

SEQ ID NO: 1770 - DNA, 258 bp, Nicotiana tabacum
aacttatgtgtgccgtgggccaagggaggcaaaggaagttacacaacagacccatccaagctctatatcactcctcaaactcgtgcatgtgatctaagaggtaattagcagcgagctcctcatttttattgcaggcaaagaaaacttctagtacaaggtcatgatcgaagcccatttgctcaagacgttctatggcttcacgctcttcgggtgttacttgtatagcctgtggcattgctgctgcaagctgtcccagta

SEQ ID NO: 1771 - DNA, 480 bp, Nicotiana tabacum
tcaataacatccagacagaacgagctggtagacacctgatgaaactcgacaagaatccataaggaccacaaggtaccaatttcagttagtacaactttgacaccacatttaaggcacagtaacttgacaaccgctgcaacaggaaggtgacattactgactttcagacacccacactgagcaatgctggacgacaactctggaccttctcaacccttaaacaagccctagtactcactgatcattctcatcatctgattgtgaaggagactttttggactcagatggtttctccgcaccgcaattctgtctgttacacttggtccgaaaaggataatttatgttgttgcatttctcacatttccagcttccctctggtgtttctggcttagtattctttcctgatttggaaacctgagaaccaggctttggagtgttgcacttcctcatgttacaaactgttctaaaagaaaagttgaca

SEQ ID NO: 1772 - DNA, 440 bp, Nicotiana tabacum
gaattactgggacagggcgatatcaagaagccaaaacaacgggtggctttaaaaaacgacatgtggagtgtaaaacctttgtccgatggccagacgaacagagttacatttaacttgacaccggaggttattcatcagatttttgctgagaaaccagctgtccgccaagcatatttgaaatttgttccgggcaagatgtcagaaaaagaattctggactaaatattcaagagctgaatacctccacagcacaaaaaatattgttgcagcagctgctgaggctgctgaagatgaggagcttgcggttttcttgaagcaagatgacatgttagcatttgaagctcgtaagaagatcagaagggtggatccaactctggacatggaagcagatgaaggtgatgattacatgcatctcccggatcatgggctacctcttgatga

SEQ ID NO: 1773 - DNA, 449 bp, Nicotiana tabacum
ttttccaaaaaagtttttttttaatttgcaggaaattacaagaatgcaacaaaagtattctaattttggggatcatgacttgggcacttatgaaaagttcacaaattcatattgtgcttggaattgttgaatgaatgaatcaaaagtaaacatcatctaagcttcaaacataatgcaatcaattgcccgtttgcaaatgccagtcattgtagcctctggtccataaacctcaaggggaactccaagttcctctcccagggcacgcatttgggctagtccagtctgataattgggaccacctcttcgtacatagatgtgcattctagctgcctttagcttggcttccttctccctgagagcccgaataatcccattgaaagtagcagcaacgtcggtgaagttagcaataccacctccaacaatgagagctctcttacggccatcaggat

SEQ ID NO: 1774 - DNA, 525 bp, Nicotiana tabacum
ggaatgtcaatttctccttcagaaccacgtgcaatatgcgcaattgtactcagtctaggcctgcagatcacaactcaaaatctgcagttagaccaatgcaagctccacagagctattcaccctctgctgcatatgttgggtctggtgcaccctcttcaatgtatatgggggtagcaccttatggtggttctctgttcaatggaccatccatgccagcttatgacgttccattttctgggggttcagcttatcattacaatattgggagccgcctttctgggggcagcccataccgcccactacatttctctgctccacctccttacactggtgggtctgtgattggaaatggtgggatgtatggtgtgccaccacatatggaccgatacggtttggcattgccaatggcccctgctggcatggcaccaaggccgggtttttatcctgaagaaaattctcaaaagaaagatggaacacgtgataatgactggaaatgtcctaaatgtggaaatgtcaacttttctt

SEQ ID NO: 1775 - DNA, 487 bp, Nicotiana tabacum
ttttagagcaaaggtgattagcagaatatgtggttaatgtaagatgtgactacaattagactttcttactgtttgtggggggtttgaagtcgcagtacaatatgaagggacaactgatactgagctatattaacacctctataaatatatttactgcataattggtttcaaactcctagtaaatattaaattaccaaagaatattgtggactacacgtccttgtttattcatcaagttcctgatccctgatccactttgtggcaacccatttttcgcctctgattactggacagctcccgtgaagagatgtcggatcaattgtaccatttggaaacagtgagtagaacagtagtccatcccctctacgcggcttcactttcaaaccaatacacttgcggaagtcataattagcatccatgttctgcccattctcgaaaggaaacatggtttctccaccttcttccacatcagataaatacaataaga

SEQ ID NO: 1776 - DNA, 374 bp, Nicotiana tabacum
ttttccaaagcaactccacgttagtgttataaaacgagtttaataaagtttgactctgatactatgtgaaagaatctaagcactaaaacaaaacctttaggcaatagtataacattgagatgtttcctttctaatttaaagaaggatagaagttcagtgcactctgctcacaagatgtagtacaaggattcttgaaccaaggattttgatggacttcatgttgagattggaaaactgaattcattactggagatcattgttcatggccctataaatttgaaatttcaaagatacaaatcaaattacttatatgtggcatacaacaagacactactaatacatagcaaaaaaaaagacaaccaaaacagttcagc

SEQ ID NO: 1777 - DNA, 525 bp, Nicotiana tabacum
gggaacaaaagctggaactccaccgcggtggcggccgctctagaactagtggatcccccgggctgcaggaattcggcacgaggtgaacgtatacatcctcaacaaaacagacaccatgtgtttggattttaaatacaataaaatgatacagaaatacaacgaaactagctgggagggaccagacgcatcttctcgtgtggcatcgcggtcatggtactatcaaacgtgcaccgaatttggtttctatcaaacatctggtgagccgcagaatctccttggaagcagcattccgttagagttctaccaaaaaaatgtgctcggatatatttggatctgcgttcaatgaaaagttactagatcaagcgattgatgagactaacacaatgtatggtgctctatctctacatgtgaaccgcactgttttcgttcatggaactgttgatccgtggcatgtgcttggagtaacaaaaaaaggttatcctggagccaaggtcattataattaagggagctgctcattgtgcaa

SEQ ID NO: 1778 - DNA, 486 bp, Nicotiana tabacum
ttactgggacactggtacctgagttgggaatgttagccaatcttcaatacttgcaacttgaatataattcatttagcggagcaattccaagccaattaggcaacttgacaaggctattgagcttgggattagagaataacaagctgagtggccctatcccatcttctcttggcaatttaaaatcattgcgatggatgagattgaacggtaataaattatcagggaaaattccaatcacagtcttgaagctcatctactggggaaatttgcagctactgaatgtttcagacaataaactagcagggacggtccatcgtgctaaccaaacaggatttgcaattacaacaatagttcaagacgtcaaggcctaagatcattaacctttggaattggattgtcctgcaaagttgctttctatattaaaatgtgtcaagtcaagtcaactcaagattttatatttatgattttcaataatcaaaatgtgat

SEQ ID NO: 1779 - DNA, 455 bp, Nicotiana tabacum
attactgggacaccatgaaatcagcagtggctgatacggttaacactggaggtcgtcaaggtggtgcaatagttgctgctctcttcctgaagcagtttgttgacgatgaaggttcaatggatgcatatcgacttagctggtcctgtctggaacgataagaagaagattgcaacgggttttggtgtttcgacactagtggaatgggtgctgaagaactctacaaactgagccagtcaggttttcgccatataatggccaacagatgagagagttataatctcaagggacttttgatgtttgagaagaagtacatcatgttttatgaataaatttgaggtgagggtggtggaaaaggaaaaagcaatagtatgggcattgatcttcataggtagattggaggatactttagctctgctttccttgtttccttgatttataaaatgtctaaaaattgg

SEQ ID NO: 1780 - DNA, 513 bp, Nicotiana tabacum
gtctgcgtgctccctgatcctcctttctagctctggtctaaagtgcctaatgaggccctgaactggccaagcagcagcatcacccaatgcacaaatggtatgcccttcaatctgtttcgtcacctcttggagcatgtcaatctcttctaattttgcattgccaaccttcattctttccatgatcatccaaagccaccctgtgccttccctacatggtgtacattgaccacagctctcgtgcttatagaagtacgatgagccttgcaattgcatctacaatatcagttgacttgtccatgacaattacagcagcagtccccaaccctgactgcacagctttgagtgcatcaaaatccattagtacatcctcacatatgttcttgggaatcaatggaacagatgaacctcctggtataacagcaagtaaattgtcccatcctccacgaacaccaccacagtgcctctctatcagctccttcaatggaatactcatttcctcttccactgtgcagg

SEQ ID NO: 1781 - DNA, 544 bp, Nicotiana tabacum
attccctagcactgaccaccaggcgcacataaaaagatcactatgcttaacaaacaaagctgaggggatacatactatgatagaaattagaatcactggcagaacgtggaggcagaacttctgagagagagcacaaggacgacaagagctcttcttgaccatgcacaataaaaacccagtgtagtttttgtcactcgccaggaaaaatcagctgagggagagtcaggaagatgtgatttacgtcctagctacagtcagagtcacatgtgaagttggcctgaaccgtctttatgtttcaaagagatgtttgcaaattgttgatcaagatccctactagtgctgcgccgatggctggaagatgattgctgttgctgctgtgactgtggcagttgctgttgctgatataatgctcgtagtcttcctctttctctttcgagtacttcatgctccaaatacttaatcatctgttcttgagctaagttttctaagcgctgctttagggctttattctccatgctgagaataagactctgctggttaagga

SEQ ID NO: 1782 - DNA, 477 bp, Nicotiana tabacum
ccaatttcagctccaactcttcgatgttctgccctcggacaaggttaatgcctgcttgccatgtgtcacatggtggacgatgaaatgaatcctaccgagcaggaattatctctggttttgtcttcagagaataagaagagcagtgtatttggtggattgtctttacatcgtccagtgcacaagagagatccagtcggcaaaatgttttgttctgtcggggcgtatacatatcccgggagcattgctgaatctccttcacagacaactgaagaaaagattggggtgctacttttgaatcttggaggaccagacacgcttcacgatgttcagcctttcttgttcaacttatttgctgaccctgatattatacgtctccctagattattccgatttctccagcgcccattagcacaactcatttctgttctcagagccccgaagagtaaggaagggtacgctgcaattggtggcggttcc

SEQ ID NO: 1783 - DNA, 481 bp, Nicotiana tabacum
ttttagtagtacgtacctaattctgatattgataaagctaaaacatatgttacatttgatgtatcaaacaatttgcatggtgttttcttctatcaaaagcacaaccaagaaaggacaaaaggttgtattttcagtagtagaagcttaatgtactgaaagggcaagaaaactgaacattggcgccactaggtttgcttcatgttctcttaatcttagaaaacgttccagtctcagagaaataggtgctttgcgttccgctgccaagctgatttgcaagcgcctgaggatttgatagctcgatcccttgcactggggtgaaggccaaacttgaagtcaaccctgatgtggcaccactgcttccataactcttctccttgaatttctttgctactttggcagcaagcttgctttgaccaactgatacacgcaacttgccgcttccagcctgaccaagcatgccgtagccctcccctagtccatc

SEQ ID NO: 1784 - DNA, 497 bp, Nicotiana tabacum
ttttcacttcattcctatgtaattgctgtgtgtttgtgttaattcttcaaaccaaaagtaaaaaatcagttactagtagaaagtgaagatatgaggatggtaagggctattgattcttcagagtgtccaaatatttgtgggtttttagttgttgaagcttatcctaaaaggtattcatctaagatcccttctgatttagtccttctcttgggccttggctttattgattggtaatacattctccttttttctagtcccatatcaattttcttgatttttacataatcaaaaatacatatagttctgttattagatgcaaaaagatacagtttttctgtaggttttgggggaaataaagactatggggtttccaagatttcatttttatagcttttctttggagttttatagctgttgctgaatattttgactattttcctatttggggtttgtagttatgtgatgaaataagttaaagggatttagtggtggtgtga

SEQ ID NO: 1785 - DNA, 512 bp, Nicotiana tabacum
ttttaacatgaaccccaactgtaaaacccaactgaaaaaaaatggaccaaaaagacacaagtcgaaagaaaccaaaaaaaacaaaatgataatttatcctaaaacccaaatccctaaggtataaaccagtcagaaactaaagccaagtaaagaaacttgcctatgaggatatatggggcttccatacttcctgaaatcctagaagcagatgaattagcctttgccactattgacttctctcttgagatttcttaatgcaagaaccaactacaaatgcagctaggacaaaaagggcagcccaatggttatgagatctaaccaagcaattgcatgcaaatcatgtagttaaagctccattgtaggacctgttaaccactgaccaccctttatgagctgaagctagcatcaattaacaaccccatttgcaatccccttagctacaggtttcttgtcggatacagtgactggtttagcaaccttcacatcgtctcctaattttgtaactgatccat

SEQ ID NO: 1786 - DNA, 274 bp, Nicotiana tabacum
ttttgtataaactattggattcaatcaacattcagccatctggatatatgacaaagaaaagatcaaattttcataacatactatttatgttttctttttgtaactggtgctaatgagctatgagacaatacattttttagcagaattcagtgtttactagcacaaaaaggaaagacaaatttgttcaagaactaggaggtgcttgcacccattgacaagcctctcacagcaaccttcacagcagctacaacactgcgctgtctcatctctggat

SEQ ID NO: 1787 - DNA, 469 bp, Nicotiana tabacum
aaactttgaaggtcatgagtacaatgatttgtacacttgtgcccttcagtttcgaatgttgagacaacatggttacaatatctccccaaaaattttcagcagattccaagatgcaaacggcaagttcaaggagtctcttagtaatgatgcaaagggtctattgagctcatacgaagcttcacatgtaaggactcatgaagagggtattttggaagaggcgcttgtttttcccactgctcatcttgagtctgcagctccacatttgaagtcgcctctgaataagcaagtgacgcatgcccttgagcagtctctgcataaaagtattccgagagtcgagacgcgctacttcatctcaatctatgaagaggaggaactgaaaaatgatgtgctacttcgatttgctaaattggattacaacttacttcagatgttgcataaacaagaactcagcgagtatcaaggtggtgga

SEQ ID NO: 1788 - DNA, 504 bp, Nicotiana tabacum
cacatttcaattttgccatctcttttggacagattaaagtttcaaactcagctctcataagtgccttcatgactgaacttgaacctgatacacctgtaactcagtgtgattatgagcgcctacaattgtcaaccaatccatatttggaaaggaatttggaatttttgattgagtgcatggatgacttgtcaatggaacagcaaaagttccaattttactatcggaacctttcccgtcaacaagctcagcagcaagcttggcttcaaaagaggagggctgagaacatgtcacgtaaagctgctggagaagagccactaccggaggaagatccttctaatcccgtctttaagccaatcccagaaccctcacgattggacagctttctcataactaatcaaatagcaaactactgcaaccagattaatggtgttgctggacagagcttcagtagactttatctgatgaaggctcttcacgagaactgaggaaatctatggaggagta

SEQ ID NO: 1789 - DNA, 509 bp, Nicotiana tabacum
ttttgccaatctaactactaccataacaatcttacagttgtcccctataggaccacaaaacaacaagaactcaaccccgttttcgcactgaaaaatatcataaatccaaatttgttgatgagtaatatacaactgcaggaaaatataggtatcataagtttgagaggctagtcccaagcactagttactccaggaccatatcccccgctataattgccataaccaccactgctgttacctccatcatagtaactcacaccacctccaccacttctattgtaagaggtatccctcctgaagtcacgcccaccaaaacggcctccgccagaccgcctgtttctacctcctccgtatgaacggctagcataacgagtcagccattcaggtacctcctgattagcttcttgcatcaggtcagctagcggtttggccattgaaagattaccttcattaaagaaagcagttgctaatcctgacttgcctgcacgacctgtcctgcctattcggtg

SEQ ID NO: 1790 - DNA, 555 bp, Nicotiana tabacum
attgcttccgcgaggatctggctcaccttctgagatctgttcaaaatcaagaaaagatcaagctgcaactgaccgccacaatacaagtcttgaaaaaagctggccgtccctcagagcgtctggttagtcatgaaaattgtagatacagtaagccaactgtacatgaatgcgtgcacatccagaagataacggaagcatcaggcactgaagaagcagaagctgatgcagaatttgataatgctctcaaggacgctattcaaggtgttcaaggtgcagtaacaacaataaatgaacatttggaagaagttaggtatgagattgcagcacttgaagaataaagattagttggttgactttgccttttatgttttctcaatggctcattgctaccgaaggtcaccccataagttccaggctgatgaaggattatcatgtacattgttcgtcataacagtttttagttgtataggcgacaaacgttttattgttgatggtgatcatggcaggtagaaaacaagctacacaatagtttatctgaatagcagataacaccct

SEQ ID NO: 1791 - DNA, 317 bp, Nicotiana tabacum
aatggagattggctatgtgtgggcagtcgcagctggattcaacgctgctcttgcagccatctctgccaaattcttctcctcccagctcatcaaatatggttgtgtcgtaatattcaatgtcacaatgtggggatgctatgtcaatagccttaaagctctatcatctctacaagctactgtgacaaactttgcaaccaactttttatcatctggattggctggatttttacttttccaggagccactaccaattcaggggttggcaggtgcggcactgattgtagtctgagtaactgttttgacctagtcaggcatcg

SEQ ID NO: 1792 - DNA, 476 bp, Nicotiana tabacum
ccatcaacagcatatggatagtcctgaatcagtaagcgaatgccatgtggggagctcgagtcctcaacagctactcctcttttgatgagatcagtaggaagtgcttgttcagggaaaacccagtctttgtaaactactgctgacatttccatggaatatttggctggaaaaactgtcaactcaagaagtccaccaccattgatcaagatctgtcttgctaaagcatttatgttcatcgtctcacggaaatgagggtggagaagcttataaatagggtgaagcgcgcttagttgcctatttgttgcaatcacgaatggctctatcactgcatgtgtattcaaccagtgactgatgagttgatgaacgcccgagtcattcactgctgcatatgctttggccaactgccagatagaaccttcaacaccgtgatcagctggtgtatatactttgctaatagcgccaaattgatctccatc

SEQ ID NO: 1793 - DNA, 551 bp, Nicotiana tabacum
acccaaccatcacgtgctgaactcgaaggttcaacaacgtataagactcggtaaaactacaagtgcacacacacaaaagactaagacaatatggataagcttcacccttgcaagatttgatgatcaatgcaagatagaagctaaaaactagtggcaacaagaagtaggaccagacttgaatctcttaatccaaaaactcagcatctgaaatctcaaagaagtatggctggaagaaccggaaaaattccggaaacagcttcagagtgggagctgcaaaaaagagaaccaaccatatctctggaaaaagtgagctgaggtactggaccattagaagacccaagttaaaggaccaaaaaaacttcatgctaacgctaccaacggaaactttactggactagttaaacttcttagctacggcatcttcaatggcaacaacactcgctaagctacacggatctctgcttaagcaaggatatcacacctccagagttgttctaagagcagatcaacggcactgctactgatttcattgcagtgctgaatgttcaagc

SEQ ID NO: 1794 - DNA, 506 bp, Nicotiana tabacum
ctctatctaagcatacggttttcccatactttaacctacgccatgagcatacttgacaagctctgggacgacaccgtcgccggtccccgtcccgatactggccttggcaaactccgaaagtcctctacctttaacttgggctcaagttccggcaaggaatcagaaggaagtcaagagatggctagggtgacaaaacgtataatgatagtaaagcctccagggaatctgagtaaagactctcctccagtttcacctgccagtgctagtgccggttccactcctccggtatctccctttgctggtgggggaggaaaggaggcatttcgattccgcaggcgatcagggccatttgcatacgagaatgctagtgggattggacccagaagccctcctcctccttacgacctatgagatatgaattgaggctcaacatgcatgttccagctgcttaattgactgtatgttctgtgtccgagttgttgttacgcgcgcttgtcgtggctctg

SEQ ID NO: 1795 - DNA, 317 bp, Nicotiana tabacum
aacccagccaccacacctccgctacataaaaaaactaacaatatttacaaaaacagagccacgacaagtcggacacgtaacatatatagagtcaagcagctgaaacatgcatgttgagcctcgattcataactcacaggatcgtaaggaggaggagggcttctgggtccaatcccactagcattctcgtatgcaaatgaccctgatcgcctgcggaatcgaaatgcctcctttcctcccgcaccagcaaagggagataccggaggagtggaaccggcactggcaggcgaaactggaggagaacctcgagccacatat

SEQ ID NO: 1796 - DNA, 510 bp, Nicotiana tabacum
gtctaagcatacggttttcccatactttaacctgcaccgattcgctaacctacgccatgagcatacttgacaagctttgggacgacaccgtcgccggtccccgtcccgatagtggccttggcaaactccgaaaatcttccacctttaacttgggctcaagttccggcaaggaaacagaaggaagtcaagaggtggctagggtgacaaaacgtataatgatagtaaagcctccaggatatgtgagtaaagactctcctccagtttcgcctgccagtgccggttccactcctccggtatctccctttgctggtgcgggaggaaaggaggcatttcgattccgcaggcgatcagggtcatttgcatacgagaatgctagtgggattggacccagaagccctcctcctccttacgacctgtgagttatgaatcgaggctcaacatgcatgtttcagctgcttgactctatatatgttacgtgtccgactgtcgtggctctgtttttgtaaatat

SEQ ID NO: 1797 - DNA, 631 bp, Nicotiana tabacum
aacccatttgctaacatatctgtcttgcctgtcaggttcccaggatctgtatctttctcctgcctgcttgaagttgttctctttctcaatgacacacatttcacgccttcctgtcaagacacgagaaggaattgggtactgttcagcatgacgacaaggatcgaaccttgagggcaaataatccacctcttcatcgcgatgcatgaagttcatggcaccatcgcggtgattattgtgatgagcacacttgggagcattaacaggaagctgcatatagtttggtccaatacggtgtctctgagtatcagcatacgcgaatatcctagtctggagaagcttgtcctccgaatagtaaagaccagggacaatatggccagggttaaacgcgagctgctcgttctcagcaaagaagttatcgatattcctgttaagtaccaatcgtccaactggcatcaatggcaagatatcctcaggccaggtcttggttacatcaagaggatcaaagtcgaatttgtctacatcctcagtgtccataatttggataaaaagtttccactcgggatagtttccagcagcaatcgaatcgtagagatcctgaatggcgtggctatgatttgtacctccgacccta

SEQ ID NO: 1798 - DNA, 526 bp, Nicotiana tabacum
agccaccacacctccgctacataaaaaaactaacaatatttacaaaaacagagccacgacaagtcggacacgtaacatatatagagtcaagcagctgaaacatgcatgttgagcctcgattcataactcacaggtcgtaaggaggaggagggcttctgggtccaatcccactagcattctcgtatgcaaatgaccctgatcgcctgcggaatcgaaatgcctcctttcctcccgcaccagcaaagggagataccggaggagtggaaccggcactggcaggcgaaactggaggagagtctttactcacatatcctggaggctttactatcattatacgttttgtcaccctagccacctcttgacttccttctgtttcctagccggaacttgagcccaagttaaaggtggaagatattcggagtttgccaaggccactatcgggacggggaccggcgacggtgtcgtaccaaagcttgtcaagtatactcatggcgtatgtaagcgaatcggtgcaggtgaaagtatg

SEQ ID NO: 1799 - DNA, 589 bp, Nicotiana tabacum
catttgctaacatatctgtcttgcctgtcaggttcccaggatctgtatctctctcctgcctgcttgaagttgttctctttttcaatgacacacatttcacgccttcctgtcaagacacgagaaggaattgggtactgttcggcatgacgacaaggatcaaaccttgagggcaaataatccacctcttcatcgcgatgcatgaagttcatagcaccatcgcggtgattattgtgatgagcacacttgggagcattaacaggaagctgcatatagtttggtccaatgcggtgtctctgagtatcagcatacgcgaatatcctggtctggagaagcttgtcctccgaatagtaaacaccagggacaatatggccagggttaaacgcgagctgctcattctcagcgaagaagttatcaatgttcctattcaataccaatcgaccaactggcatcaatggcaagatatcctcaggccaggtcttggttacatcaagaggatcaaagtcgaatttgtctacatcctcagtatccataatttggataaaaagtttccactcgggatagtttccagcagcaatcgagtcgtagagat

SEQ ID NO: 1800 - DNA, 243 bp, Nicotiana tabacum
ggcatttccgcagctccaatccccttgattcgaaaatggtgaagggacgccaaggagaacgtgtcaggctatacgtcaggggaactgttcttggatacaaaaggtcgaaatcgaaccagtatccaagtacttcactgattcagattgagggagtgaacactaaggaagaggtggactggtacctcgggaagcgaatggcctacgtttacaaggcaaagacaaagaagaataactcacacttcg

SEQ ID NO: 1801 - DNA, 240 bp, Nicotiana tabacum
agtgtgatggttttggtcaaattggtatttggttcttgtactttcagatcccttttttagcagcctcaccactaggatcagcaatctttagcaagtagagtaccctgtccaactctgactgaagggtggagagttccttatgaagcttttccttcttctcatgagctagctgcgaggaaagcccagacatgtaagcatccagttcatctccagcttcaacctcacattcctgacctgtac

SEQ ID NO: 1802 - DNA, 562 bp, Nicotiana tabacum
atttcaaagtgcactttaagatcggcgatttcaaggaggacttttcttccttcagttacagcattcataacagttcctccaccggtttaaagcaagcacgcagacggccaggcgtaaactcttccagcggcggtgcgctactacaaatttccatcgcatgcggacaacgtggctggaacgggcaacctttcggtaatcgcagcaggtttggcggattacccgggatggtcaacattgtttcaccttccgcatcgagacgcggcaccgcgttgagcaaaccgatagaataaggatgaacgggttgataaaagacatcgcgcgcgttgccatattccatcgtgcgcccggcgtacattaccagcactttgtcgcagatccccgccaccacgacaagatcgtgggtgatcataatgatggcggtattaaattcccgcttcagttcatttaatagcgtcatgatctgcgcctgtacggtgacgtccagcgcagttgttggttcatccgcaatcagcagcttaggtcgacataacaaggccatcgcaatcacacttcgccttctttg

SEQ ID NO: 1803 - DNA, 262 bp, Nicotiana tabacum
tgtgattcaattcgtggaggtatgcacaacttatgacttgtcaagcaaatcataaaatggaaaaattggatgaacaaaatttcgaattcgctgctagcaaaaatttagataagattctggttattctggaaagcaaagttgaatacagaaattttgataagatttaaaaaaaaaagttaaataaggaaatgtggcagagaagaagttggaaggctgaagggggatgcgtaaaggttttttccttcggtctcggcaaaggtta

SEQ ID NO: 1804 - DNA, 84 bp, Nicotiana tabacum
agtgtgagcagctgaaggtgccaccgtctggaagctgacccagcgtgcagactcaactgaggcgacatcagactcatcacattc

SEQ ID NO: 1805 - DNA, 515 bp, Nicotiana tabacum
ggtactgcatcttccatctatgtggcatctgcgttggctctgaaactgggtatgaagcgcgaacacatgttgcagcagaaagtggaaaaagaaggggcggatcagccgtcaattctgccgtaatcaagttcccgttgatgttgaaaatcccggtcagaagatcgggattttttttgatgtatggagattgcgaaaatccccgcatcttgggaaactgcgcgtaaccctacatttcatccaggtaacttttcatggctatcatcccaaaaaactatgcgcggttagaaagcggctatcgcgaaaaagcattaaaaatctatccgtgggtctgcggtcgctgttcccgcgagtttgtttattccaacctgcgtgaacttaccgttcaccacattgatcacgaccataccaataacccggaagatggcagtaactgggaattgttgtgtctctattgccacgatcatgagcattcgaaatataccgaagcggatcagtatggtacgaccgttatcgca

SEQ ID NO: 1806 - DNA, 171 bp, Nicotiana tabacum
ttttctggtgtgctgactgatgagcgcggcagggttcaagctttatggggaagcttttcaacacagctcaaatatggttgtagttcatcagaagatcaccaatttgtccggggtattccaatttgtaccttaagccaagtccttggcaagattatttccagtaccgaacgg

SEQ ID NO: 1807 - DNA, 521 bp, Nicotiana tabacum
cggtactggcgctctcttcgtcttttactgtcaacgcagctgaaaacgacaaaccgcagtatctttccgactggtggcaccagagcgttaacgttgtcggaagctatcacacccgtttcggaccgcagatccgcaacgatacctaccttgagtacgaagcattcgctaaaaaagactggttcgacttctatggttatgcggatgcgccggtattcttcggcggtaactccgatgctaaaggtatctggaaccacggttctccgctgtttatggaaatcgaaccacgtttctccatcgacaagctgaccaatactgaccttagcttcggtccgttcaaagagtggtacttcgcgaacaactacatttacgacatgggtcgtaataaagatggtcgccagagcacctggtacatgggtctgggtaccgatatcgacactggcctgccgatgagcctgtccatgaacgtctatgcgaaataccagtggcagaactatggcgcagcgaacgaaaacgagtgggac

SEQ ID NO: 1808 - DNA, 507 bp, Nicotiana tabacum
gtcagctggtctcccaattattatactactgtagtatagaaattctgctgctagtttttttatccttctcgtcccctccctcaaacccctttaccaattcgaagaactcaattttgatggcggaagaagagaaatcagtgcaagaggagctttcacttccgattttacttgctgacagagtcattaaatcagcccaagaagctgaatcatccaaagtggaatgtgccgaactggctcgtcacgctactcagctcagccaattcctccgagccactgttcgtctcaccagttcgtcccaatcccagtccctctacgaccgtcccatccgccgtataacttctgaagttaccaaaactctggaccgggcacttactcttgttcgcaagtgtcgtcacaagcccaatctcctccgccatgttctcgccatcacttctactgcagacttccggaaagtctctacccttctagaaaattccacggcggacgtcacgtggctgctctccattt

SEQ ID NO: 1809 - DNA, 528 bp, Nicotiana tabacum
actgacatcatgaccgatagaaccggtatagaacgtcgaggtcaggttggtctggttggtgagaattttattactcacatctttggtattcgccgtgcgtgaccaggtccagctattcacatcgctggtgggctgagtaatattcgacgccccgcccataatcgccgtcatcaggtaatcctgctttacgcgcgaccaacgggtagtattgcgaatggtggtgttatcgttgatgtcgtgctcaaaacgcatggtggcggtgtcggtggtcgaatcgtcgtaatcggaatccgtgccgtaaaagttatgagtatcaacttttccggaatgattcagggccgccgttcccgcagatggggcagaatagcccggcaaaccgatggtcggaatgccgccgtctggcgtgttgtgctgggtgacatgcagataattaagatacaaacgattcgctgtaccaaggccaaaagcgacagaaggggcgacgccgtaacgctcatttttgactttgtcgcgtccggcatcgtgcgt

SEQ ID NO: 1810 - DNA, 554 bp, Nicotiana tabacum
cttccattttacaattctagaaatttctcacacagttcgccattcatttgtgattttagggtttgaatagagagaatccaaaaaatggcggacagttcaccggcgactcgaaataactcgacaagcataacagacctcgacatggacgcattggttcactgtgcaacttatttgaatcttcaaaacctgtcaaacatggctatgtcttgtaaataccttcaaagagctgcctattctgactatatttggcaatcccttttcagacagcagtggtctccaatagtaccttctagctttcctcatataccaactgccagggaagcgtaccttgcaaggcgtagtgatgtgctgcagttcaagttcgttgaccctatcgttgtagagtttgctactgaggttaaacctcatgaaaatttgcatcttgacaaagacaatatcatattttctcagggatcttcagtccatatagtgaacattggcaattttctggatggaagtgatccgtatgtcacactcggtgatcacacctccagaattacttctatgagattaat

SEQ ID NO: 1811 - DNA, 378 bp, Nicotiana tabacum
atctgcatgcggaaatttatgggagaaaggcacaggctttttcttacgcatactgctcaaatacctccgagccttttcatttcttatcctggcaatggattctggagatggtgtgcccaacagatcggtcatcaagtctaattggtgaaccacatttttacccggaaagagaggcttcccagttaatagttctgcaaatatgcatccaatgctccatatatcaattgctggtgtatacttagagaaaaatgatccacacaattcgggagccctataccacctcgtggcaacataatcagtccaaaatatagctgttggagtatcattgaaggccactcttgcaagaccaaagtcacagatcttgagcttgcagtcggc

SEQ ID NO: 1812 - DNA, 377 bp, Nicotiana tabacum
ccactcgaacagcgtatgattgtgctgggcgcactggaagcggtcgactgggtagtgtcgtttgaagaggacacgccgcagcgcttgatcgccgggatcttgccagatctgctggtgaaaggcggcgactataaaccagaagagattgccgggagtaaagaagtctgggccaacggtggcgaagtgttggtgctcaactttgatgacggttgctcgacgaccaacatcatcaagaagatccaacaggataaaaaaggctaaccggaaagcggttcacagatctcgctcgtacatggcaggcctattgacgctgttgtttttccaacctagagtaaaggaacaagggtaagggaggatttctcccccctctgatgagt

SEQ ID NO: 1813 - DNA, 560 bp, Nicotiana tabacum
catgtctggtaagcacaatcctttactcagttgtatcaatgtgtccttcatccgacggtaggtcacctcatttgccaacttctcaaggcgtaaaggattattcagaccctcttctgggacatcatcaaaagcaacagtaatagatgagtcctttagcctgtagacaaccccctgtccaagtgcaggggagcctaaatcagctttgtttggtttcagaacaacaacgtcatgagtgccaaacttgtgaggcggaagaatatcccctttgtttgattgaagctccatcagcgtcttgcccattaaccctgtctggatatcagcacacttcaaattcagaatagtggaacccttcttctgagcagaatccaaactcctcgtctcagctgagctcatggaaagtgatatttcagcttccttttccaaatctagtaaaggggccatggtggaaacgaactggtcgacagtcatggcagttgaagatgatgatttgtttttcttgttgttgcttttccctttctccatttgctactaactgactaactctgcgatgatgatgaaga

SEQ ID NO: 1814 - DNA, 541 bp, Nicotiana tabacum
tcctttaaagtaaactactacttgttccaaaggattgaggaaaccgcggttcttagctgataatgtagagcaaacgaaatccagcacacaaatgtctgtacatacccctacaaccaacaaagtttgaattttgttgtttttcacccaatcaacaaatacattagagccatcctcctgaaaagaaccaatatagccatcgtagcaatctttacgcctgattgttacgttttgttccttctccaaccatcttagtgcaggaaccaaattggattcatcagtgccagtgatacagtgaggaggataagggtgttcaagtttgtgaggttggtgtgaatcaagaaaggcaagaataggccatttcttgtcacagaacaatctagccagcctttttgattcctcaatcatttcagagatctgcctgtttggctctcttggtgccagatttccagctccaacagagcaaaagccattgatgatatccacaagaacaagaccagctttcacatcttcagtgatgatcagtgattcctcctctatggga

SEQ ID NO: 1815 - DNA, 579 bp, Nicotiana tabacum
gtaagcacatcctttaagtgctcctcttcaacaattcaataggaagttgaatgaccaaaaaaaataaagaaaacaagtatatctgcaaataccaatctgcagaacagatcatgaatttcgtgcagattcgtcaagcatcattcctttcagactcttggccaaccaaatagccgtctccctcggtgaaaccttgtttttgccgaaaggttttagaacgacagcaagctcttctaatctgttttgctccagtaagtcagcagataattctaatagtccttcaagtgcatctgccctttgtctaaaagacttgacatctaacgtttcctttaccggcctttcctcctctgcagccggttctgaagaatctattcttggtgctgaagaggttggagtgctgttgtttcttacgtccatctccttatcatggacaccaatcaccgattcagcaaaagtagaagcatttggagtgccatgagaacctagactgtcgatatcaatttcatctcttaccacatttatcagtttcccaacatcagcacctgtctccatagtgtctgctgctggccctcgtgccgaatt

SEQ ID NO: 1816 - DNA, 449 bp, Nicotiana tabacum
ctttagaactaatgtgcatccgacatttgtcttgatacaaatgtcaccaatccccgcaatctttgagtaacttgtgttacccattttcactgtgccgaaatcacctgctacatatctgcaaaaaagatctcttaccggtgtggcatggtgagatgccgctgtgtcaaccacccattccgactctgaacctgacaggtgcatgcattcctcttcctcatttataaagaggacaacattatcattattttgcaccatggcggctgtgttgtcgtcattcttctggccactggtttcacctttgcccttccttggatttgggcaatctcttttgaagtgacctggttgattacagttgtagcaatttctgactcttgatttggatcggttctttgacttcccacgatgctccggatctaccatagttgttcgaactcctttgataactcctg

SEQ ID NO: 1817 - DNA, 196 bp, Nicotiana tabacum
tatccgccatagatatagctgcatgagttatctgcaatacgtctatgcaggcgacggcacatccatctctatctagaacaggaaggtgcagaaacttcccatcatgcattatatgcagagcctgaagtattgttgtctctaatgttgcgcattcagggcttggtgtcattaccttttccgccagtgtcagctcagg

SEQ ID NO: 1818 - DNA, 299 bp, Nicotiana tabacum
atatccgccatagaacttcctcactacagtcgacgccgattccaaatcagttacagaatcagaagaaggggatgaagtaacctccgccgtctgattgctgttccgtacaactacgtgtcttatcccacggccagaaatgatcctaaattgataatcaatagagcggttgggtttggccggagagaaaatgggggagaggtttggattgagagggaggagagagaaggatgaggtgctgctcatcagcatcaccattgctgcacttgcagtttgatgctactgtttgtgttgtgtttctg

SEQ ID NO: 1819 - DNA, 386 bp, Nicotiana tabacum
catagaccttatgggaggcaagatataggcgagtgctgttgtcgaatcccaaagctgccagcagcaatccaacttcttcgggggtcaatgggcaccgtccttgactccttaactcttcatcagtaaactgagagttgatgacccttcctccccaaattacttgccggtatttagctagagccaaattttcagccttgccaccaccaaaatcacaagctgaatgagctgccatatccttgtcgaagcgaaggtggagaacagcaaacttgcctgctccttgtttgggcttaagatcggtaacttctctgaggtagttgttactaaccatgttgccttcactaggaggattcctgaggcgattgataagggcatccccgagatgtctg

SEQ ID NO: 1820 - DNA, 451 bp, Nicotiana tabacum
gttaaaagtaaagtagaagacttcctgtttcgtttagggccctataaatagaggagggttttgtgatggcagaggagtgtgcagcatttgtattgcctgtgaagagaccaagagaagaggaacaacaacaggaagagatggaagcagccaaccacaacaacgacaacggttgcaccaatgagtctccttatatctcttctgttcttcctggctggttctctgagattagccccctttggcctggggaagcacactcgttgaaggttgagaagatattgtttcaagggaagtctgattaccagaatgtcatggtttttcagtcatcaacttatggaaaggtgcttgttttggatggtgtgattcaactcacagagagggatgaatgtgcttaccaagagatgatcgctcatcttcctctttgttcaattccaaatcccaaaaaggtgctggt

SEQ ID NO: 1821 - DNA, 534 bp, Nicotiana tabacum
cttaatgaattacaccacttcaccatagtctttgtcaggtaatcctaatacacagcattctgatatagttggatgctccaatagtactgcttcaatttccaatgctgataacttgtatccaccgaccttcataatatcagcattggtccgtcccaaaatgatgtaatatccttcttcatccactgtaacagcatctccagtcttgaagaacccatcatcagtaaatgattgcttggttacctcaggtagcctccaatattctttgaacaatgaagggctcttaatgcaaagctcccctactcctgttttatcactaccactctcatcatccaaaaggatcttggcctgaacacctgaaaatggcttgccaacagtacctcctttgcgtttgcctttaattggattagatattgccatcacaaactctgtcatgccataacgttctaatagccgatgacctgtaattgtttcccattgctgcatgacgggcaaaggaagtgcagaggagccacacatcataagacgcaagtgcct

SEQ ID NO: 1822 - DNA, 538 bp, Nicotiana tabacum
cacttattcatcatacaaaagcgcgggtagataagaaaaacagtaataatacattctaaaatccctttaattattcaagaccagaaccacccaataggctctccttcttcatgttgctgctcctctgccgccacaaagacgttacagaagtagccatggccgccgccgtcatcactaccatcatcttcctccgactgcaaaccatccataggcggaggaatattattacatcctccagcccctagtggatactcttccatatgaccagtgtgaaaataggagtccccactgtccaccagctgtggactgtgctcatctaccaccctcgtgccgaattcggccgaggttgaggagccagctcaactcattgcaagaggcttcgggaggaaagaagttatctgttaatgatcttgtaataaaggctgctgctttagctcttcgaaaagttcctcagtgcaacagttcatggaccaatgattacattcgccagtatcacaacataaatatcaatgtagcagtgcagactgacaatggactt

SEQ ID NO: 1823 - DNA, 278 bp, Nicotiana tabacum
ttttgaataccagaaatctgaactctgaattgatttaagtctctatacaggtgtacgaaaaaatgaacaagaggcaagagaccagagcgacattacgtcctttacccacggtttcttccgagttgttctacgttccaccctccatatggtgaaattacataagaaataattagaagtgtatctatttgacaacagaaaactataacctacaaatctattacagctcgtcatgtgaatcatcatcctcggcggattcctcgctggcacctcctggggct

SEQ ID NO: 1824 - DNA, 448 bp, Nicotiana tabacum
gctaggtttgggatacaatccaagcattgaccggtcagaaattgagaatgcagctgtgatacattacaatggtaacatgaaaccatggctagagttggcaatgacaaagtacaggtcatacaggaccaaatatataaagtttgaccatccatacattcgcagctgtaagcttagtgaatgaagcattgatgagagctatagtacagttgatctactcatttagctcgtcttctatgcgacagactggtcacattttctataatttggttgtgaccaatgagctcttctatgcagcaattttcttgtctccatgcgatgtgacccaattctttattcttccctgtgaatctgtgagtcaaatgtattcatcgttcagtttctgatgccttgttcacctgtaacgagtcccctctgcttggagctaagctcaactggggtaacaaagagt

SEQ ID NO: 1825 - DNA, 574 bp, Nicotiana tabacum
accacttgcggaacatacatcatcggtccctagatcgccctcttttaaggaaacacctatagaacagcttgaaccatcttgaatgaacctttagtgatgtggtgtaagcacagcaacaaaactatgattttcacaccggcctaaccaattgcttttaggctgacggttttccttcactattcgtaccccactcttcgtctgcctcatttctattaatgagtactgcaccgtcagtagacacaccatccacgaccacagcctcttcttggccctcttcttgttcctcattttgtgcatcatctgcctccaattcttgcacctcatcaccactctgttctgcaacctcgtggtccatatctccattttcaagtggttcttcatccattctcatgttgttgaaagcctctacaaggttgttagttgatctatcaacatgatttacgtaatcagttgctggtgggtagccacccctttcctctgcaactctagcttcaacagcacatgcaacttgccagttctcaaacagattaggatattcttcaggatcagccaaagcttctgctgctttctggtt

SEQ ID NO: 1826 - DNA, 311 bp, Nicotiana tabacum
cttgctgcatccacatgaattggagtgtcccacccggtttctttgttcttctcaatcaagaggtcattcaagcgcttaacatcttcaaattcaccattgagagtggaacccaagatagcagctacacaaatagtgttctcatcaaccatctctacagccttgactgggtccattacatagtacccttcccttagcttcacttctttcagttccacttcaaaatagttagcaaatttctcccagcacacctgaacattggcaccggtgacaatgttgggcttatcataaggttttccctcagctttgcgttt

SEQ ID NO: 1827 - DNA, 486 bp, Nicotiana tabacum
aaatagctcatcaaaatgttttccaaaactaacctttttctttgcctttctttggctattttgctaattgtaatatcctcacaagctgatgcaagggagatgtctaaggctgctgctccaattacccaagcaatgaattcaaacaacattactaatcagaagacgggtgccggaatcatccgtaagataccgggttggatacgaaaaggtgcaaaaccaggaggcaaagtcgccggcaaagcttgtaaaatttgctcatgtaaataccagatttgcagcaaatgtcctaaatgtcatgactaaagttaggccttgagactatgtacttgtgctggtgtgagtttaattttgagagtaaagggaaagttatgaatagcctaatataattctattcactatgttttcttagtaattcttattgttgaaacttggaacaggtctttgggtcaaaatgtacctcttgtcttgtagtctttcaactgtatg

SEQ ID NO: 1828 - DNA, 456 bp, Nicotiana tabacum
gttccttttgatgagcttgttggcatgcatggtcctgtgtttcatctggttgaaaatgcatttactgttcttgccagtaatatgatatttcttggagtagtaatatttgttcctttttcattagggcgaattatactctattatatgtcttggcttctgtcctccgccagtaatccagtattgtcaactttcatgccacttactgaaacagcacttttcttggccaatattactctgaagagtgcattgactgctgtagcaaatttgacagctgacgaccaaaaaaatggtttgcttggtcaagttgctgaaatattgaacggaaatgccaccgatctgagtgcagcatcggataacctccgtgcaacattgtcagctgaccttttgaaaggatcatccctttggggatccaggctttctgatgttaccactcttgctgttggctatatgtttata

SEQ ID NO: 1829 - DNA, 471 bp, Nicotiana tabacum
gcaacgttgtgggagcagtgtggctattgtgcagcaatatttcgcaaactctatatctcggcttttactacctgtggatggtgcgcatgctgcttcctgtgaagaaatggctacagctatgtcaagtgctgagggtgctgcttataaggggcttcagcagtgcattgaaactgttatggcagaggtggaacgcatactttcaactgaacaaaaagccacagattatcgatcacctgatgacggcattgcccctgaccatcggccaacacaagcttgttcaaaagttgtcgcgtacctttcgcgggtgcttgaatcggcattcacagcactggaagggcttaacaaacaagctttcctggctgaattggggaatcgtttacacaaaggcttgcttaatcattggcaaaaattcacttttaatgcaagtggaggactgcgtttgaagcgtgatataacagagtatggggagct

SEQ ID NO: 1830 - DNA, 436 bp, Nicotiana tabacum
atttagcatcttttgtgacaacatggatggaaccagagtgtaataagttaatgatggattccattaacaagaactacgttgacatggatgaataccctgtaaccactgagcttcagaatcgatgtgtaaatatgatagctcatttgtttaacgctccacttggagatggagagactgcagttggagttggaactgttggatcctctgaggctattatgcttgctggattagccttcaagagaaaatggcaaaataaaatgaaagcccaagggaagccctgtgacaagcccaatattgtcactggtgccaatgtccaggtgtgttgggagaaatttgcaaggtattttgaagtggagttgaaagaagtaaaattgagtgatggatactatgtgatggaccctgagaaagctgtggaaatggtggatgagaatacaat

SEQ ID NO: 1831 - DNA, 436 bp, Nicotiana tabacum
caaaaattaggcagttcttaactgtacaatttgagctgcagagtttaattagcacaagaatgaggagagtaccaaccgtattatttcaagctggtaaagctattggagatttggatttgctcaaaattgtgcaatctgaaatcaaccacgaactctccgctaaaccttttcagaatgatgaaagtagaagctttggagattttgttgtagattgggattcaccacaatctcaagatgtggttctacgcaggagatgcgaatcaggggaggaagttgctgtttctgctttattgggtgctgagagctctaatgaaaatgtgaaatttcccagggaagctttcatgaaagtaggtgtgaagaagcctggcttgagttcccgtgctagagtttgattgtgtagcaactgcccaagttggtgatggttgtgactttgaaa

SEQ ID NO: 1832 - DNA, 395 bp, Nicotiana tabacum
ggatcctctgaggctattatgcttgctggattagccttcaagagaaaatggcaaaataaaatgaaagcccaagggaagccctgtgacaagcccaatattgtcactggtgccaatgtccaggtgtgttgggagaaatttgcaaggtattttgaagtggagttgaaagaagtaaaattgagtgatggatactatgtgacggaccctgagaaagctgtggaaatggtggatgagaatacaatttgtgtagctgctatcttgggttccactctcaatggtgaatttgaagatgttaagcgcttgaatgacctcttgattgagaagaacaaagaaaccgggtgggacactccaattcacgtggatgcagcaagtggtgtaattcattaagattataagtc

SEQ ID NO: 1833 - DNA, 558 bp, Nicotiana tabacum
tacaccacttgggctactacttggattctcatatttgcgtttgtgtgaaatgggcttagaacaaacttctgagatgagttcaaagcaattattcactttctccttgctaattttgagaaccccaagaagttgattttggtattcaacagaattacaaggctcaacttgatgaataacgtggagcataattgcagtggctaatacagacggcatataacgtacgaatctacaatcagccataatagagagaaggagactttcacatcttctaagaaattcccagtgaacattattctttagcccaagcctccttataatatgatcaagaaatgaaagtggggtcactggattcatcctccattttagtgaagacaacaccaaaagctccattctttgaatagtttttgcctcaaacacatatttagcatcctccacttgaaagtctaaaagaagaggaacttgagtttcttcaactttagcagctaaagaaagacaagtaacagcagcaagttgaatcatccaaggcttatctttctgataatgaagactagtcaaaaa

SEQ ID NO: 1834 - DNA, 524 bp, Nicotiana tabacum
cagagcttcattcatagagatctgaagccatcaaacattctcttgggagatgatatgagggcaaaagtagcagattttggacttgttcgccttgctcctgatggaaaagcttccgttgttacaaggttagctggaacttttggctatcttgcaccagagtatgcagttacgggcagagtaaccacgaagattgatgtgtttagctttggtgtaattctgatggagctaattaccggaagaaaagctcttgatgagtcacagcctgaggaaagcatgcatcttgtcccatggttccgcagaatgcatattaataaagagacattccgaaaggccattgaccccacagtcgatcttgatgaagaaactctgtccagtgtcagcactgttgctgagttggctggtcactgctgcgctagggaaccccatcaaagaccagacatgggtcatgcggttaacgtgctttcatctctagctgagctctggaaaccgcagaggttgacgaagatgaaatatatggaatcgat

SEQ ID NO: 1835 - DNA, 454 bp, Nicotiana tabacum
gaaaatatgggatctgggcatatatttttcgaaccgtcttgtcacggcaacatgttgttccttgggaattcagatcctgttttccgaggaccaagatcgatgatgaagatggaggactcctcaaagaggcgacctttctttagctcgccggaggaactatatgacgaggaatattacgacgagcagtcgccggagaagaagcgccgtctcactcccgagcaggtgcacttgctggagaagagctttgggacggagaacaagctggagccagagcgtaagactcagctagccaagaagcttggcctgcagcccaggcaggtggctgtgtggttccaaaaccgccgtgcccggtggaagaccaagacccttgaaagggattatgatcagctcaaatcctcttatgactctcttctctctgattttgactccatgcgcaaagataatgagaagctca

SEQ ID NO: 1836 - DNA, 433 bp, Nicotiana tabacum
ttttctcaaagaatgatacttttgctattaattttttttgttcatttgcacctaataatgttatctttaccagagactcataatcacatcatctttaagttcatgttccacagaaatgctagttaacagtcggccagccctccccagcatccatgaattgagttcatcccaacagagagaacttttcacagatgttaaacagtttcctcgaaccaaattatacattttaagaatacaaccaaactaatgaccacccaatagacccaaaagaacctaaagaaaaaccttggattgcgcttatgcccctcagaagaaataaaaatatcatatatatagtactaaattattagccagtagtcaatgatttgctaaaagaacttaagttttcctttgcccatgtgagctttcccatgctccacataacatgctgctt

SEQ ID NO: 1837 - DNA, 323 bp, Nicotiana tabacum
ccagaacagtacattcttaaaattggagaagggattactacaatttgcatgagtggatttgctgctttggatgtgccaccacctcgtggtcctctttggattctcggagatgtattcatgggggtatatcacactgtatttgactatggtaattcccgactgggttttgctgaagccgtgtaatatcctttctttgtaattacttgccactagttacttcatagaatgatggaagtattgtaaagagatgaatgatactgctatgttattgtgttgtatctgaccgtaatatggcatactaatcttctttctgttgactaaaa

SEQ ID NO: 1838 - DNA, 502 bp, Nicotiana tabacum
ccaacaacaacaaccaacaaccaagtaaaatctcacaagtgggatctggagagggtacagtgtacgcagacattacccctaacccagaggatttgagaggctgtttccgaaagaccctcggctcagcgaaagtaatttgttcggagcagacatttcttccgaatgcaaatgatataggaacaaagaaacgggagaaataatagtggataaactatacacgctggaattttgaaagttgctacattaagcaaactaatgttgagagcattggctaagatggcttagtctgtacatgtgcagataggaccatgaggtcatccaagaacgacggtacatagtcatcttctgtagatacccttctcttcatagtgtagcaaaagatcttaactgttagaaaagtagccacttgctagcactattcacgcgtttgagttttcagtgtggttagttttttctgcagttccaagtttgacatcttttccatctccaaagcacgtgcaag

SEQ ID NO: 1839 - DNA, 486 bp, Nicotiana tabacum
ttttacataatttaaagctcggctgtcatatcacaaaagatcttggtaatagccccttttatttatatacaataactcaatcattatattgtcatactaacataattttatcatcatttttccaccctccactctagcaaaaaatacaatcctccttttatatatctatacacaacaatggtaaacaaaaatcactcttcatcctgatttccatggttcctagcatcaagaacttgacttcttgttctctttgcatgacgatggtggccgtgtttgttaaatttcaacctccccgtctctttgaaatgttgttgttcaacgtgatctatctcgcattctggtggtggcactgaatatctcaaagaatcgtaacaataagaataatacatatattttgacctaaatcttttcatagccattctttgtcttggtgtaatccttgaaaaatctgccttttgaagttcatcatctttctcgtcacaacta

SEQ ID NO: 1840 - DNA, 481 bp, Nicotiana tabacum
ttttagccttaattgccaaaactaaaatattatgtcgttgacgcaattggtgttactagccaaagcttgcagggccctaactcatccgtttctttcgcattacacagttgtacaacacaacacaatgatttttacatgaagaaaaaatgaggactgacttgacaaggcaatccccaacaggaccagctgaattcatcctccatctctcatcaattacaagacactacaataattgacaactcggcagtccatgtcagcagacagttcgaccatagcagattgatgcaatgtaaagatttttagaccatttttccttaacatgggtacttgggaaggcagatgtccgtaaagtctcttgagtctcatcaatcattttacgtcttggtacgctcaatatgaaggctgcttgatcggcagtggcagccatagaagttattctataaccactttcccaccgtcgatgtattccttcacttgggta

SEQ ID NO: 1841 - DNA, 439 bp, Nicotiana tabacum
ttttacaaacaactttaaaattcgaacttcatttttgcagtataaactacagaaatacaaatcccactacgtggtttgaagcacgataataaagtgctgatgaaatctaagacttgagttcacaatacattactaaataacatatttacacaaattaggataatgtagtaaaacccttgatcacagacaacattcctcggataagttcatctcacaggttaggattagtagtatgggcagcagtcacagtagagaccatggcatcaactccacagatattgtgacccctgcaaatcttgtaatatccatgctctccccagttttctccccaagaattcttgatgatccagtaagccttttccttgagtctgataggagcaaagccatgagaaccataacctaccaagagcactccgtgatcctgacgcttgaagcagat

SEQ ID NO: 1842 - DNA, 438 bp, Nicotiana tabacum
cataaacataatactcctcaaatggctgctatcacactcctaggattactacttgttgccagcagcattgacatagcaggggctcaatcgataggtgtttgctatggaatgctaggcaacaacttgccaaatcattgggaagttatacagctctacaagtcaagaaacataggaagactgaggctttatgatccaaatcatggagctttacaagcattaaaaggctcaaatattgaagttatgttaggacttcccaattcagatgtgaagcacattgcttccggaatggaacatgcaagatggtgggtacagaaaaatgttaaagatttctggccagatgttaagattaagtatattgctgttgggaatgaaatcagccctgtcactggcacatcttacctaacctcatttcttactcctgctatggtaaatatttac

SEQ ID NO: 1843 - DNA, 400 bp, Nicotiana tabacum
caattcacaatacaacaatattccactgcagaatcagaatcacaatgaagaacttactcagtggaaatgtggtgaatattccaatgaattcagctgtatgctcatttgaaaagcagccagaaagactattatccctatctccttgccaagaccatattccatctgcaacttcaaagattttatctaaattaaagcaaagaaaatctgtgattggtaagatgaccaaactgggagaaaggatggactgtcttgcacaaggtattcgcgaacatgtgagccttagcccgaagctaacagaaactgtgaagggaaaattgagccttggggccaaaattcttccagtatgagatgtgtaggagagaatatgcaagcagaagtttagtgttagagatgatgaaaa

SEQ ID NO: 1844 - DNA, 406 bp, Nicotiana tabacum
aaagctctttctgaacatgtatgttggcaagaggaagccatttatgccattagtcagactgtctcccatcgcagaagtggaaatggaaggcatcatggctctaggaaaggaaataatatctggctcagcttccttggtcctgacaaagtggggaagcataaaattgccaaagctcttgctgagaaagtctttggttgcagcgatagcatgctctctgtggatctgagctctagtgatgggagtagctactcaaattctctctttaaccatcaagatacaagaaacagttacgtgaatcttaggggaaagacagttgtcgactacattgttgaggagttaagcaagaagcgttgctctcttgtgcttcttgaaaacatagaaaaggctgattttcttgttcagaata

SEQ ID NO: 1845 - DNA, 306 bp, Nicotiana tabacum
agcttctactatgaaaatgtttcctgaaacatattctgaagaatcgtggattaaataacgcaccactgaagtcaaagccgggtctgatgttccatgagttctcaagggaatggttctcaatgcaatattgtggagccagtccttttgcatgaggccctctgttatctcagatctgaaaagtcctggtgatattgagttcactctgatcttgtatggtcccaattcaagggccatcatcttcatcacagtgttaagagcagtctttgaagaagcataagcaagacctcctggtaattgcccacgatt

SEQ ID NO: 1846 - DNA, 427 bp, Nicotiana tabacum
ttttacagcaaaatcgtccaatgtattaacatgttggagctacataaattagcaccacacaaaaatctcaagtaacaagtactaacatttacgcagacactagcattaaacaaaaaccattaccaacacaatgtttacaaaccttatactcaaacaacttttaatcagacagagttatagttgataacacattaaggcgcgcagtcccacatcgaacaggagaaggaggcctaggaactttttaaaagtggtctgcaagcccgtgtcaatatggttatacgacagcaaacgcatctatgttgataacaaattgaatgtacaagttttcttttttatttcatcggttgagggaggaaggggaatgttgtgctactgataggttttgaaccctccacctcattttggaaggcagagaactcaccaagtg

SEQ ID NO: 1847 - DNA, 233 bp, Nicotiana tabacum
cctcgtgccgaatcggcacgaggccgagtccctagggacattcgtggttttgctgtcaaattttacaccagagagggtaactttgatctggttggaaacaacgtccccgtcttctttaatcgtgatgcaaaatcgttccctgacacgattcgtgcactgaaaccaaatccaaagtcacacattcaggaatactggaggatccttgatttcttctctttccttccggagagttt

SEQ ID NO: 1848 - DNA, 462 bp, Nicotiana tabacum
ttttgaatatgatatgaattattaaagatatatgcgtgagacacaatctactaattaatctatttctttcaaataccccactagaaacagatcacaatttcattttataatacctcgggagctaatgaaactattttagtaaaatttaattctctcaattcccgggcgattgcaccaaaaattcgagttccttttggatttccttcttgatcaataacaactgcagcattgtcatcatatcgtattatcatcccgttgtcacgtttgagttctttacaggtccgcacaattacagctctgactacttctgatctttctaggggcatatttggtacggcttctttgatcacagcaacaataacgtcaccaatatgagcatatcgacgattgctagctcctatgattcgaatacacatcaattctcgagccccgctgttatccgctacatttaaatgggtctga

SEQ ID NO: 1849 - DNA, 364 bp, Nicotiana tabacum
tggtgtgaaaagtcagtgattttatcactttcaaccccatatctttgcttataggaccatagaatccagtgatgcaagttagtacttcatgaggatactctaactttaccctatttgtgcatttcccagcatttgcaccatgttttactgaccaaacagattgtccatttcgatcgtactcaatttcgatacagcaaatgccttctgatgattgtgttaggattatctgtttgatcccagtgaaaactccatcatcccatggcttcccaccatctccaccccatggaccaggtccagatggtgctggatctttcactatcctttgcactccctcctcagtgagtcctttctttcccagtttaaa

SEQ ID NO: 1850 - DNA, 507 bp, Nicotiana tabacum
gctttctccgccccatcgacgttaatctacaggttcgcttttctgttcttgaggattgcttaccactagcagaggagacgttcaggcaagcgattaagaagaactatttcacaaggtcaaagtttgattgcctattgtcctctaaacaggtgaaggacctgtgtaagcttttcactgctgcgatgcaaaggttccaggtccaaagacacgcggcttggatttgagacccctgcgatatccaagcgagatagagttaagaggcggggtcgggatggcagaagacgggctgaacgtgctcgacgacctgagcgggttgaagaacgtgggtaccgtgagcgggttgaacgtcctcattttcatgaaagggatttagttacatctccattggtgccattagccccgcttcaacctttaccaccacctgctcctgttcaatcttatgcatatagtaggactttgagaacagatccttatagacgggacacagtgatacagcatgatgatact

SEQ ID NO: 1851 - DNA, 530 bp, Nicotiana tabacum
ttttatagtacacacttttcattataccgaaacattttaaatgtgttacactgccaataagacagaatctgacaagaaataaggatgaaaatttaacaagcagcaatgcttacaacggctaattgcttttacaatgatgcaatgtgcatacagaaactagtgctttacaagaagcccgggccttcaaaatttttaccttctacaacagcttgaccaactcgaaggccgaagcaagagcacaaattgctttcatcttgcctctagttacgcgtcttcacttcgccatccttaactaagacgttatttacatggcaattcactgtagagacatctaaaggaaaaatctcttcgaggtcagaaggaaggtagaggcctctcctagtcacgtgcgagagagacatctaaggacaaaccttttcgaggtcagaagaaaggtagaagcctcaatcagctcagtggaaaacctagtaagggaatcagaatgacacaattgctagccaactagagtaatattaatcggcaaagcatat

SEQ ID NO: 1852 - DNA, 332 bp, Nicotiana tabacum
gtcgtctgtaggcaatagagaggtagagagttttttttatgcaattataaggagtaaagagaattgtaaagtagaatgggagaattgtgagaaatgttagagaataagtgtttgggatacacttgtgtgacattcctcttgaagtgaatttctgatatactttcggtatttttttgggtaaattagagtggagtctctaatttgtattatcgctatacacacttttataatagtagaattcctcctcctttcgcgggcatggacataattggccgaaccacataaatttcggtgtcactatttttctgttgcagttactatcttattttgtt

SEQ ID NO: 1853 - DNA, 576 bp, Nicotiana tabacum
aactagacatacaatggctttgaagaagccaggcgacaaaagaagaagaagaaaatgtttctacttggacaactaagttatcataacttcttcaaattgctgtataaatagaaagtatcatattcagtatgctcttcttgggagtggataggctcgatttacatcgtgccttggatgaagtggagaacgatggtgcaaaggttgctgaccatatctataagcagtctgatgtctggaacttactctaggctccttgggtctttcattgacagcttcaatctgttccagtttctccactacttctttcattgatggtctggttttaggttcaggtccaagacatgacagtgccagttgtgctatttgtactgcagctctggatggatatttcccttccagccgtgaatccatcttgtcctttaacttccttctatcagataaatgtggcttaatccattcaaccagattatgctggtggcttggacggtttgtgtctagtgcccgtagacctgttagcatttccactaaaacaacaccaaaaccatagacatcgctctttacgtataagtgtcctgt

SEQ ID NO: 1854 - DNA, 407 bp, Nicotiana tabacum
agatggcattgttgctctaggagggccatatgtcccgctcaaaacaggaagaagagatggaaggaagagcagagcagacattcttgagcaacacctcccagaccacaatgaaagcatgagtgttgttcttgagaggtttgccaatgttggtatcaacactcctggagttgttgccttgctaggggctcacagtgtgggaagaacacactgtgtgaagttggttcaccgtttgtatccagaagtagaccctcaactcaacccagaccatgttcctcacatgctcaagaaatgtcctgacccaatcccagacccaaaggctgtgcaatatgtgagaaatgacagaggcacaccaatgaagctagacaacaactactacagaaacatattggagaacaagggcttgatgt

SEQ ID NO: 1855 - DNA, 524 bp, Nicotiana tabacum
ttttaattccaaatcataagctagtaaactatatcttactgtagaagcaatattcctggcaatgtcattatcttgtcatacaaatacttaaaaaccaaagataggctcatgctgttaattccttgatgcagctttggtttccaaaacagtgtcaaattactgttgtgcacattgaactctctgggcgccaccatgcatgtcttcgtcttcgttgtatgcctcttgggcttgttgctgcttcctacgcatctcctcttcaatgttaacatcatgcaaagtggtctcctcacactcatccaattccatgtcagtcatttgcgttttgggttttggtggcagcaccgcttcaaggttcttgcactgctcgagggataatgtctctgggaaatctacagtaaagtgaatgtacagttttcctctcataaacggcctttggtacattggcattccttcatcatttatggccttaaattgatcaggcttgacaacttctccaggttgggacttaatgagtagctgtctat

SEQ ID NO: 1856 - DNA, 580 bp, Nicotiana tabacum
gaccaactagacatacaatggctttgaagaagccaggcgacaaaagaagaagaagaaaatgtttctacttggacaactaagttatcataacttcttcaaattgctgtataaatagaaagtatcatattcagtatgctcttcttgggagtggataggctcgatttacatcgtgccttggatgaagtggagaacgatggtgcaaaggttgctgaccatatctataagcagtctgatgtctggaacttactctaggctccttgggtctttcattgacagcttcaatctgttccagtttctccactacttctttcattgatggtctggttttaggttcaggtccaagacatgacagtgccagttgtgctatttgtactgcagctctggatggatatttcccttccagccgtgaatccatcttgtccttcaacttccttctatcagataaatgtggcttaatccattcaaccagatgatgctggtggcttggacggtttgtgtctagtgcccgtagacctgttagcatgtccactaaaacaacaccaaaaccatagacatcgctctttacgtataagtgtcctgt

SEQ ID NO: 1857 - DNA, 500 bp, Nicotiana tabacum
ctatgctctttcattatgcccatattcatcatcttatattgctgtgttttgataatcgtcttcaaggtttatttccctaaaatgaagaatccatttagaaggtctgcgttcgagctatcaattcttcttccattaaggtattttgttttggatggttatgctgctggtatatctagccttcctatcactgcaataaagtattatctcttcgtaccaaatctagataacctggttcatctgtattttggtagaagtggagtccaacagtgaagatagttaatgttttttttaaagaatttggatcttatgggtactctttttattgtaaatactggaagaagtgttgaagagggtatgagagaaagcttcgaagatccttttagtagggcagacacaatgttgggatagtcaagtttctttaatgcatgtaaacattttgcttttcttcaagttttgtggctctgttcaccttctccttgatgaggtagcagagtacttct

SEQ ID NO: 1858 - DNA, 508 bp, Nicotiana tabacum
gaacatttccatcataataggagtactcaatgaagaattatacatagatctccataacacaaggggacatgtctacatcacaaatgtgacgctacagccgaatggagaaacagcactacaatgttctaaaggatgataagtagccaattatatcagattattacagacacggcttgccagtttatttgacagagaagcctagaccacaaccctaaggtacataagtgatttagcgatactgaggagccagttccccatccttgacaatgtaattttgtgctgggaaatcctcgcccttgaagtacctgtccagcatatccttcgttccagcagcataccgcaactgtgcatcaatggtagtccctgaaatgtggggggtcatagcttggtttggcatgtagcgccacggatggtccttgggagctggttgtgggtaccaaacatctccactgtatcctgcaatatgaccactattacaagcatcaacaactgcttgagtgtccatgat

SEQ ID NO: 1859 - DNA, 480 bp, Nicotiana tabacum
tgcaggaatacggcacgaggaaaatagagagaaagaaaagtagaaagatggaaactttcccagtggttaacatggagttgcttaacactgaacaaagggctgcaacaatggagacaataaaggatgcttgtgagaactggggcttctttgaggtggtaaggcatgggatctgtcatgagcttctggacagagtggagaagttgacaaaggggcactacaacaagtgtatggaagaaaggttcaaagaaatggtggcaagtaaagggcttgaagctgttcagactgaaattaaggatttggactgggaaagcactttcttcttgaaacaccttcctctttcaaacatctcacaagttcctgatcttgaagatgaatacaggaaaatcatgaaggagtttgctgataagctagagaaattagcagagcaacttttggagttgctatgtgaaaatctaggactggagcaaggttacctgaaga

SEQ ID NO: 1860 - DNA, 510 bp, Nicotiana tabacum
ttttctataggaatgggatgccaattaacaatgctagtttgactagaactacaaatttaatcctactaaaacaggaatcaaattaccaggaaacaagaaataagaaatcctaaacttcaaggaaaagaaattctaatcttgaatggatttttggacttcttgaatctcttggatttttggccttcttgatcttgcatcaacttgcacacaagttgtcactatataacttgccaatttgaatagaaaaaattcaagacgctttttctaacaaatgtcctcacttgaattttctaatacaatggatcggttcagtctcaatccgctcagtcttaaagctctctaacttcatgggaatgtttcaatctctctagaatcgtgcctcctatgcaaaaactttcttatgaactcctctgtgttgcgcacctgcacatgctccagtgcatctgtactacagttcaatttcagtattatggtagcttactcaacctctaaccgaacttcccatcaaga

SEQ ID NO: 1861 - DNA, 394 bp, Nicotiana tabacum
ccgaattggaattgaagtctccaccaaaccctaactccttaattgtatcagcaccgccctcaactccaccggaatcaccgccgtcgactgccggcagcagaccgatatggctccggcaacggccaaagataagagtaacgactgaatttgacagcgacagctctgtattcttccacaggatttcatgcaaagtgcttgatagttttgcgaaattgaagttatcgtttcagaataacggtaagggagaaatatcggacccgcaattggcgttatctacgaagtatttgtcacttcagtatgacattgaagacaaaaatgctcttgttaacgcttcatttagtatggctcctggttttgcagtttaaagctgctcatgcctgtaaaggcacaacaa

SEQ ID NO: 1862 - DNA, 180 bp, Nicotiana tabacum
tggggctggttgttgctgttgatgataactcacaaacaaggcagcatttcataccacagtatgtattgtcacacagaatgaaacaaagaccatttgttcatgaacattcgcaagttacaacccatacaaatgagtttgagctgtttcagtgttggtgggtaagaccaaactaccatcttc

SEQ ID NO: 1863 - DNA, 315 bp, Nicotiana tabacum
tggggctggttaatgaagaagaactcataaataagcccagcaagcccaccaccaatcaaaggcccagcccagtaaacccagtggttgttccagctccagctcacaactgctggcccgaaagaaactgctgggttcatagacgccccatcaaaggccccaccagccaaaatattggctccaacaatgaaaccaattgcaattggtgcaattgttcccaaactgcccttctttggatccactgcggtagcgtacacggtgtagactaggccaaatgtcattactatttcaggtaccaatgcgtttcctacacccact

SEQ ID NO: 1864 - DNA, 471 bp, Nicotiana tabacum
cagaaacatattggagaacaaggggttgatgttagttgaccaccaactagcaacggacaagaggactaagccttatgtaaagaaaatggcaaagagccaagattatttcttcaaggaatttgcaagagccatcactattctaactgagaacaatcctcttactggaacaaagggtgagatcagaaagcagtgcaatcttgccaaccagccccacttgtccagttcaatcgaattcccgcggccgccatggcggccgggagcatgcgacgtcgggcccaattcgccctatagtgagtcgtattacaattcactggccgtcgttttacaacgtcgtgactgggaaaaccctggcgttacccaacttaatcgccttgcagcacatccccctttcgccagctggcgtaatagcgaagaggcccgcaccgatcgcccttcccaacagttgcgcagcctgaatggcgaatggacgcg

SEQ ID NO: 1865 - DNA, 206 bp, Nicotiana tabacum
aaacactttggccacctttatttcctaagatcccttccattttatttatttttcttctcttcccattcttagtttcaactttattctttcaatttccaatggccagcgttgaggttgaatctgcaccagtagcagcagtagagactactccagctgaggttgaggttcaaacaaccctagaggaaaccaaagtagaggaaccagcc

SEQ ID NO: 1866 - DNA, 228 bp, Nicotiana tabacum
  misc_feature (93)..(94): n = a, t, c, or g
  misc_feature (116)..(116): n = a, t, c, or g
  misc_feature (172)..(172): n = a, t, c, or g
  misc_feature (177)..(177): n = a, t, c, or g
gggctggttgatgttgtaattattatagtagcagaacttggtttccatgctattacaccgcggacatggaagtatgttgtctggtttttgtcnntgccttctcctgagtgacattnggcctcatctcgggtcttctttcttggtagcttttggggaccatgtttctttatcnggcantcctccttctctgggatcatcacttataccagatgatgtttctgtttcaac

SEQ ID NO: 1867 - DNA, 222 bp, Nicotiana tabacum
ggggctggttcattagttggagctttttcctggctgcgagtaggttgagaattgttaccaggctctccacttccaaacaggtatcccaaagaactctggccacctccagcacttactccgcgacccatctttaatcgactgatttctcaacaaaaaaccccaagtactttgttatcaatgccgaatcatgttacatgaagcgagagacggagagaggaaccg

SEQ ID NO: 1868 - DNA, 389 bp, Nicotiana tabacum
gctggtttaagcttcgttaaatttccaacctttgaacaacgaggttttccagtacaccaaccccccggtgtgaagcttccattgcttcgatggaggagttcttcatcaatcttgtccaaaacgggatcatcttgcttgaacttgcgtgcaaaagcagcatcacttccaatcatttttgctgtgtcattaatgttgagagtgtgtggatgctgtcgtggagggtaatcccaagaaatatagtgcatgtcgtggttaataacagtcgtagcaaattctggggcattgcacacaacggtctgaaagtatccttcaggagaagagacaaaatttgtgtagtacataagtagggtcctaggaagattatcccaaccccatatgcagtactccac

SEQ ID NO: 1869 - DNA, 489 bp, Nicotiana tabacum
gttctctgtgggaaccaggtcacagaaattggctaactcctgacagaggtggaagacgtgagagggatcggcactctgttaacatttctactgaatcacttggtatggcaagtgaacgaaaccgaggaccaagggcattaaaaccaaagagcaagggtcccattgaggatagctcttcatctgtcatccgtaaagaagttgagtcgactaatactttgcagcctgagcagtataatcggcctgaatttgtcactggttatgaacatgccaagttctttgtcatcaaatccttcagtgaagataatgttcacaaaagcatcaaatatagtgtgtgggctagcactcctctgggaaatggaaagcttgatgctgcttatcgtgaagcaaaagagaggaatgctgattgtcctgtttttctctttttctcggtgaatgctagtggacaattttgtggggttgctgagatggttgggcctgttgattttgaga

SEQ ID NO: 1870 - DNA, 481 bp, Nicotiana tabacum
agttctaatacaatatgcaagttgaaactgtaagcattcacaaacaaaacaaaggactgaacaacagaaaagttacagagagtaaatagcagagagaaaataggcataaatggcgttgcaatcatccgagaagatgaaatgtagaacacttttgagaaaggtggaaaagaaaagcaagatggtgcggtggttatcataccagatatttacgcaatttacgcgatgtgatctattttgaacttctgaaaatagaggcaccattcatattttctaaatcttaagagaagacgacgaatgggatataacaacccaagtctctatttacaaaaaagcaacaaattgggtcctttaagatatgagatgaaccttacctgaaaggctgaaacctcctcaaaatctgtgataaacatttttgtcatgtttgagtcttctcagtgaagtcccgaagtctattcaacaaaagctaactacaaatccatat

SEQ ID NO: 1871 - DNA, 220 bp, Nicotiana tabacum
ggacactaccacaacaattggtgcatatttgattatttttctcttcttctgaacgtggacaaactccataggcaattcttggatcacaatttcggggacaagcttttggatttctaggatcagactgtcctttacaaacaaaagttccattagcactgaagtagttacaacccttcgtgcctgcgcaacagttggtgcatatttgattgtcctccttttc

SEQ ID NO: 1872 - DNA, 386 bp, Nicotiana tabacum
ataatttattgatgtttctatttgtccattactatacttctcagttgtccaaagtagctaataatggcggtggaactaatgatggattacagaaacactaggaattgtactttggtgaccaaattggaagaaaaaacagttgtagaagaagcatcttctggtcttgaaagtgttgagaaactcatcagattgttatctcagactcagactcagactcagtctcaacaaatacagcagcaaaaacagggatatttagagcaaaagaactcccctatggaaattgaaatggtggctgatgctgctgttacaaagttcaaaaaggtaatctcacttttagatcgaaacagaactggccatgctagattcagaagagcccctgtggcttc

SEQ ID NO: 1873 - DNA, 96 bp, Nicotiana tabacum
gcaaaatgaccagagtgacagatattatggtagaggacccatccaattgacaaaccgaaataactatgagaaagctagaactgcaaaatgggaatg

SEQ ID NO: 1874 - DNA, 515 bp, Nicotiana tabacum
gcagttctagcaaaacacgtgaccacaaggtgtggctgttggatcttggcggctgcttaggcaaagcgtgcatttgcttggactgcttccttgtgactccgaggttgacgtggattcaaccagcccagacttcccagtttcagcagtaattagattgccttcctcatttaaaacaggtaaacctcggcctgtggaagtctgataggttccaaagggtgcttgttgaacagaagctgaaatggatgataaactactacgcctcagaccttcagccgcaagaatacataattgaattagaaggaagacccctagtatttgatatctaggtcgttggttcataggtttgccaatgaacacatagcgaatgcccgcagtacgttttgatatatgataataaaatccttcaaaatagaagaacatgagattggtccggatgaccaattgcaagacctcacgagcaagaggaagcaccgaaggccaccttcgaactgcatacaaccagaaatcccttatct

SEQ ID NO: 1875 - DNA, 202 bp, Nicotiana tabacum
gttctcgggtgcgtcgtggagaataaggtgctacacaaatccctgttgttgtgcatacaggatacagattttcagaagacaatatactcttccaggttaagttcaataaccttcccctcaaagtcttcaatgccaagttccagtggcacatcatcatccgcttgtggaagttcagcaaggttagaactgcaaaatgggaatg

SEQ ID NO: 1876 - DNA, 477 bp, Nicotiana tabacum
gttcaattgcagtaagctagccatggggagaagacctgcaagatgttaccgccagattaagaacaagccttacccaaaatcacggttttgccgtggtgtccctgatccaaagattaggatctatgatgtgggcatgaagaaaaagggagttgatgagtttcctttctgtgtgcatttggtcagttgggagaaggagaatgtctctagtgaggcacttgaagctgcccgtattgcgtgcaacaagtacatgaccaagtctgctgggaaggatgccttccaccttagggtcagggttcatcctttccatgttttgcgtactaacaagatgttgtcatgtgctggagctgataggctccaaactggcatgaggggagcttttggtaagccacagggtgtttgtgctcgtgttgcaattggtcaggttcttctctctgttcgctgcaaagatggaaacagtaaccatgcacaagaaatctc

SEQ ID NO: 1877 - DNA, 488 bp, Nicotiana tabacum
aaaagtttgatctcttctcttctccccttaattctttctcctctactccattgctaagaaaccaatttttcttcttcttttttcgtccatcgtgtaagaaccagtgcagcttcgtcgcacctctattcatagccgtgtgatcttcacaaccgtgactacaactttattcacgttagttccacccagaaccaccagccttgaaccaaatcctccatagccaccaaactccaaaacaaactcagttcaaacaatactacctaaaaattctataaaacaccaagatccaaggggttttgttgggttctgagttcgtgttcgagttacagtccttgttcgagtttccggcgccgctgaagttttccggtctaaggctcttgtcggtgcctatttcttggtccagcttgggttctggaaaattgctctactagaatcagatttcaatggagctcacaattgcattaacatttggaatgtattatttgctatag

SEQ ID NO: 1878 - DNA, 381 bp, Nicotiana tabacum
ccaaccagtaagactcagacaataaaagagaccattgcagaaaactaacttattccaaatgctgctaacaaatggcaaacgattttggtaattggcagttgtccattccgttgcccccggttgacatgtgctaattgcgaccaaagtggggctgatatgcttaactgtgaaaacgatacagttcggagatgtaggagctgcagaaaaagcaactatctggtatgttaattctagtcttggtaaattgatcacgttcttcgtataaggattgaagaacaacacacgtaaagttctcggtttgtatagcagcaaccagccatctttcgcgtaacaaagcctagagccacgtaactctggtaactcaactgaataagtttgcct

SEQ ID NO: 1879 - DNA, 472 bp, Nicotiana tabacum
gttcttgcgagcctgaagattttgctaatggcaaaccaattgtgccttgtggattaatagcgtggagtttatttaacgatacttatacatttgctagtaacaatcaagaattggttgtgaataaaaagggtatatcttggaaaagtgatagggatcataagtatgggaaagatgttttcccttcgaattttcagaatgggactttagtcggaggtgggagtctgaattaataatgtaaaatcactagtgaattcgcggccgcctgcaggtcgaccatatgggagagctcccaacgcgttggatgcatagcttgagtattctatagtgtcacctaaatagcttggcgtaatccatggtcatagctgtttcctgtgtgaaattgttatccgctcacaattccacacaacatacgagccggaagcataaagtgtaaagcctggggtgcctaatgagtgagctaactcacattaat

SEQ ID NO: 1880 - DNA, 505 bp, Nicotiana tabacum
agactcccatagtacttcaacattatccttggagtatgaattacatgttccccagctgaaacggaccaaagttgggaaaccaaaaactacgtgtttgtgatgatccagccaagcttttgtctcaggatctccaggatatccagatccaaagttcttatgcatgttctcagcagtttcatcaagcacccaatcccgcaacgctcggtccctagtaacctttgcaacaatactggctccacttacgacggggtaaagactgtcagctttttttgcaacaacaaatttgattgttggaaatatttcagagagcttcactctgtacttttcaggatcaccaacagtatccacataaacctcagttaaaagaacaccaaggtccagtgccttccttacaaggcctatcgcagaattatgtgatatttcattaagatttattttggttttctttaacatcttggctgagagatctcttggatctatcacatcaaccgcccatccgatggat

SEQ ID NO: 1881 - DNA, 529 bp, Nicotiana tabacum
ttttaaacctaatgtactcccaaagggggaagaaatatattattcgtagaaaaataaaattggggaacacgatttattatttattttatttatgtcatagttcacatatctgtcaccttattataagtaggatacttgacaaacacaattacgtaatccatcacttcatctcttgaaatgacactccccatgtttgtgaagctgtacgagaaagtccccaattttgatcccctgcaacgtgccatgcaaaataaccaagcaatcctctacctttaacataattaaccttatttctaacagtttgagtatcatcatagctaatccaattactaccagagtaacaataatctccaacaatggtagcgttatacacagtcgtggcgcgactctccactatataatccctaattctgttataagtcatcgacccatcatcgaccgcaccaacatttgattttccggcagcaggtgctctaagaccgtgaatattcgcgttaactaatcgccacgcatagccataaaatggaat

SEQ ID NO: 1882 - DNA, 587 bp, Nicotiana tabacum
gactcccaaccaaccagtaagactcagacaataaaagagaccattgcagaaaactaacttattccaaatgctgctaacaaatggcaaacgattttggtaattggcagttgtccattccgttgcccccggttgacatgtgctaattgcgaccaaagtggggctgatatgcttaactgtgaaaacgatacagttcggagatgtaggagctgcagaaaaagcaactatctggtatgttaattctagtcttggtaaattgatcacgttcttcgtataaggattgaagaacaacacacgtaaagttctcggtttgtatagcagcaaccagccatctttcgcgtaacaaagcctagagccacgtaactctggtaactcaactgaataagtttgcctcactgaagggtcgtagaattcaaccaagtcaccgaattttgggaaaaacataagccaaggtggtttattcgcaactcgtacagagacggaaacagcaagccattgcttgcaaacagcagaggcacggatgttttctctcaagtttaaccgggagagaatcagttcaagaatttccattggtacacaaaacaatgagt

SEQ ID NO: 1883 - DNA, 428 bp, Nicotiana tabacum
ctctaattaaactcttccgttcatttttcttgaattattcgcaaacatatagtcgaccccaacttgtttgagattgggacgtagttactgaaaagtcaactcaaattatgagttcaaacaatccatcgtctagcactggagtttttggatcggatgaacatacaacaataagaagaaattcaaagcgaccaaagtattcaaaattctcacaacaagaacttccagcatgtaaaccaatcctaacaccaaaatgggtgatttctattcttttacttattggtgttgtttttattccaattggtattgtttcccttttagcttctcgagatgttgttgaaattattgataggtatgatgttgaatgtgtaccaaataattcaacaaatgataaagttggctatataacaaataaaaatcaagataaaact

SEQ ID NO: 1884 - DNA, 469 bp, Nicotiana tabacum
gagcagtacgcaccccagattattcacgtgcatccaaacaagacttataggcttagagtggctagcagcactgcattgtcttcactcaacttggccattgggggtcacaaaatggtggtggttgaagcagatggaaactacattcaaccattttctgtagaaaatatggatatttattcaggtgaaagctattcaattctcttcacaactgatcaaaacccttcaaacaattactggatttcagtcaatgtaagagcaagagaacctaaaacatctcaaggcctcactatattgaattacattccaaattttggttcaaaaattccaatttcaccaccaccattgccacctctttggaatgattataactacagcaaagtcttctataagaaaatctttggcttgattggatcacctaagcctccaactcaatacaatcgtcgttttttgctcctcaatactcaaaaca

SEQ ID NO: 1885 - DNA, 168 bp, Nicotiana tabacum
cagactcccaccagtcactagctgtacagccagtctacctagtttctcagcaagcacgacataaggagccaactcggacaatacctcaggagggaccattggagcattcacagcggtagcagaaagttccccatttagagcaccaacaacagcctcagctatttcaat

SEQ ID NO: 1886 - DNA, 438 bp, Nicotiana tabacum
ctcatttcacctttgcttttcttgtcatcagatctacacatctttatactctctctatttatagttgacccttcgctggaagagctttttgctggccattttctctcacaggagggaaggccatgtgagttgttgcaagcggacaagtatagacatcattttgttgggttttcagtgagcttagtagtttggttagttgctgccagatgggtaaatgtcagggttgcgggaaactaggaagaatggtgagtgacgggcctatgagtgcttaccaatcttctcttcttcaatctcctgttgtttctgtctgggactgtattgttcgtaaaatgaggtattcctttagacctgagtttgtgtaggtgtacttttagtaaacgctttagattggatagcatttagtcttttgcaatagtattaataacagggcacaaagga

SEQ ID NO: 1887 - DNA, 554 bp, Nicotiana tabacum
gactcccaggtgcatgcttataaagccccctcattcactcattttcgtcatcatcatcttaaagttgagctggtgcactccctctgataaaggtacctcggcgatcacccccaacaatcacatctttcagtcgagatagtggaccaaacatcctgccaatcctctccccatggacaacctgccacttcgtttgcaacacctgccacctttcttgctgccacgtctgcccaataatcacaaggcccataacagcagcagcaatgaaaatagaccagaatgcatttgcgtctttcgcatgggccacaagggaagcagcccctcttttccaccatgcttgacaaggaaggttagctgtatcatcatcatcttcatctttagactttggcaaatttgagatgcctgagtctaagccctggtaaaagagttcaactggttctgcatgcacattggtttcctctgttgttgctgagagatccatgggttcttcactctggcatgaactatagttagcagtaccaaggaaactctgctctttgtctaccaaacttaagcct

SEQ ID NO: 1888 - DNA, 537 bp, Nicotiana tabacum
tcccacattgcaagtcttttctgtcgtgcttctgtttgatacttctccaattcatccagagcctgttgtttgtccttgggctcccacctcctccttttctccatcctagcaagtccttccttaagcaaggtagcatttatgctgacatcagtttcaggatcaaccaaagtcaccaaaaagattgtccctgttccttgacctttgacttttccacctgaagcgtctttttcctcgatagcagctctgaattcctttggcccacttagaagaagctcacttagccggtaagctgcttcctgaccataatcatcctctagcccaggaactttaacatgagcaagactgcagagctgagctagaccaggactggaggaaacagatgcctctagaggccgcaactgactgtaagaaacaacttcttggtttccataatcaatgtagaaaacttcaaacttgtctttggaagattccacagcaccacgaggggcattgacaatcattgctcggttccatgaattatcagcactgaattgagca

SEQ ID NO: 1889 - DNA, 379 bp, Nicotiana tabacum
ggaaaatattgataaacccaataacgttaagattcagaagtatcatcatcatcattgatttaaatgaaaacagaaactccaacaaaattcaatgtttcaaaagcactaaaaactctctttagctaaaatagcaataccagacagaaagatacgactgaaaaaatcaatcgacggtctgcatgatatcctcagcagtgaacttagtacccttgtccttatcagcagcagcgcgtcccttggccttacgattaagtagcgatttcctgtccttgtcaagcctgagtttcgtaacaacaaccttagaaggatgaataccaacgttaacagtagatccattgaccttctctctagttatacgttcaatgtgaatcacccattt

SEQ ID NO: 1890 - DNA, 366 bp, Nicotiana tabacum
ttttagttcaagagttcatgtcattgacatccaacaacaaaaatggcagagctaattacgccccgacacaggaaatattggaccactcaacaagcacaagtgtttaaattcacaacatagactccacttgtatataactattaagttcaatatccccataggagatttatttagtgctcgaattgcaacattcaacaagctgagcgaagcgcacacttcaggaaccacacaaccgccatatggtaacatttattacagcctataaggatttcaacttcttcgcctctagtaaatttaagcagcagcattaactgcacagccagcgccttctgcatggacaaacgattcaatatattctttccttgc

SEQ ID NO: 1891 - DNA, 430 bp, Nicotiana tabacum
ttttgatgaacaagcagcacagctcttgaaattcctgttataaatccactgtcacaagtgttgtagaaacagtaaacttacaaaagcactaagacatacttgaatggccactaaaaaaaagaaaaaggccttatttttagaagtttcagcaaaccggaaaggaaaaggttcagacaagaacattctgctttgatcggaaaaccctctcgagactatggtatggtagtcgaaggacaaaatgttcaaggctccacggtcatgttctctgcttcccgtctaacagattcaaagagcacagaggaaagatatcgctccccgaagcttgggaaaacaacaacaatgagcttcccagcattttcagggcgcttagcaagtttgatcgctgcagcagcagaagcaccagatgatatgcccacaagcaaaccttccc

SEQ ID NO: 1892 - DNA, 445 bp, Nicotiana tabacum
ggctgcagtaagggaggaaattccacctgctttaagagctgctgttgatcctgcctttttggttctggactcactcaagggtttctacccgtctgaagtgtcaatttcagatgctaaaaaagatgcaaatctcttaggtcttcgccgaacttgtattatgctgatggaatcccttagcattttattaaagaccctggaagtagattctatttcaagtttaatatcaggaagcgtaaaggaacgtgcaaaagcgattgctaatgaatggaaaccaaagttagatgagcttgatgctgatgccagtaatgggaattccttggaggctcatgcattcttacagcttttagctacctttgacattaactccaactttaaccaggaggacctgtacaagctgatacccatggtttctcgtcgtcgccaaacagctgatctctgtcgttcc

SEQ ID NO: 1893 - DNA, 445 bp, Nicotiana tabacum
ttttcaggtaaactggcaaacaaagtaaaattacatgaagtttctcccttactaatagtcatcaaatagatattcacaaattgaaaagacatgtctcttgacaacccactttaagggagattaagaagtaaactaagttctttcgccgaatttattcattcaccaccagcacaataagacattgctgttacaaagtctcagacatgcctggtgacgcctttgccattatcccatagcatatttctgagtccagctacgagcagtggtctcgtatttggacctgtcggtcttgtacatgtgagcaatttctggtacaagcggatcatctggatttgggtcagtcaatagggagcagatggagagcaggaccttagatatggttaacgctggactccactgctcttttagaatatccagacaaatacttccattgctattgatatta

SEQ ID NO: 1894 - DNA, 376 bp, Nicotiana tabacum
aaacctcggtatagatcttccacctgaaaaggtgttcttgttccagaaggctgctgttcacaagtgtaacatggctggcaagccagctgtagtaacacgtgttgtcgatagtatgaccgacaatcttaggcctactcgtgctgaagcaacagatgttgctaatgctgtcttggatggaactgatgctattcttcttggtgctgagactctgcgtggattataccctgtcgagactatttccactgttggcagaatttgcttcgaggcggagaaggttttcaaccaagacttgtactttaagaaaacagtcaaatttgttggagagcccatgacgcacctggaatccattgcctcatcagcggtaagagccgccatt

SEQ ID NO: 1895 - DNA, 510 bp, Nicotiana tabacum
ttttgaggaaaacgaacgctccattcatgtatacactaatgaattaatttctgttagaaaagtcatttttccctaccagcccgcaattctccaatccaggtctaaattacaaaaagcatcttcaaacccaatttgcaaagtgtaaacaacacaccaacaatttgacaaggaatgaagacaggtaaccagcacaatcatcatcgacaataccaactataaccttgattccctccaaccaaatatctagggtcaatttacagaaactgaagccagtgcctctgggtctacttatataatgagctcatcgaatttgtggaacttcatcgacaggaggagcagcaaagcgcacattagctggccgagccaccactaccggctcgtcagcaaacattgctttgataaatgctggtgttttcaggggtctacgaccagtcattcgtggatagacgtcttccaggaaataataagcatggcctgcaatcattcccagtaaatccacccaagcactag

SEQ ID NO: 1896 - DNA, 487 bp, Nicotiana tabacum
ttttagaactaaatcttttgaccaaagtcaaaatgttaataacttgaatacttcaaaacaagagtgcctacaagctacgagagtactgccaactaagacgttaacccctaaacaaatcttattaagatcgacccaacaaatagaactataactaacccaacccaacaaaactacataacattatcatatattaacaggaaacatatcatgtgaatgcaccccactaaactgcatggattggactgtggctagagttcatgcctgagctaccagatgaaggattagcatggaaagctgactgcctggaggagccctcaaccagttttagtgagagagaagatggtttggcatcaccaatggattctcctaaacttagctttgacataccaaccagctcatcaacattaattggactctttgaatgaacagctgttggcttaagaacttcatgggtctctgcttttgccggctctgcagtataacctgg

SEQ ID NO: 1897 - DNA, 448 bp, Nicotiana tabacum
cacacactctcttcaacttcttccatttgggtctctctctttctctctctacattcacaaaaacccatctttttctctctctcttttttcttgtattcatatgtatgacgaattcttaagaaagacaacgacttagctagtaaaataaaaagataagatgaggatgttaatggccattgattcatctctatatggtttcttagttattgcagcttaccccaaagggtattcttccaaaattacttcagatttagtccttttcttgggccttggcttcattgattggtaatttttcatctaccccacctccactatatttacacttatatttaaaataaaataaaaattatactaaagatttaatttttatatgtctttctaaagcttatgcactttgttgattctgtctcattcttttgttgcataataattagggctttgtgaatct

SEQ ID NO: 1898 - DNA, 472 bp, Nicotiana tabacum
ttttaaaaaacagacaaaagaacgccgaattctagtcataccagctgttgagaatttctatgtttacatatttaacatatcatcattcatcaatcaacttcctttaaaatttatacatttttgcttcttttttttttggtaggaacatattttgcttcacttctatgtagaaaaagaaaattacaactagcttagcctgaagaatcagtgcccaaaacatggagagaaatatcctctctttaatttgtatatttttcgtcatcattattcaataatacttcggcgaaattcctggctatttatttctacgaggttaagtgaccaacgtcttcccatttctttacatgcgtagaggccttctctgcctctttattccaatcacatcttattgtgattatagccaaaatcaaagtctgaattgcagttccaccaaagatcattccagcccagatgcccatgacaccatagtgga

SEQ ID NO: 1899 - DNA, 445 bp, Nicotiana tabacum
ggaaggctgagcatttgtgaaaagggacaaaaagagaaacaaatcgatcgattggaaatggcggaagtgaatggactgaaactggagcagaggcatggaaaatccagagtgagagtagccagggtttggaaaagtcatgacgggaagtatcactttgctgaatggagtgttaacattagcctcctctccgattgtttacctgcctatgtcgccggtgataattccgatatcgtcgccaccgataccatgaaaaatactgtgtatgccaaagctaaggaatgttcagagcaactttcagctgaagattttgccattatacttgcgaagcacttcacctctttttatcagcaggtcactgctgcaattgttgatatagttgaaaagccatgggaacgcattagcataaagggccaacatcatgaacacggttttaagcttggctctg

SEQ ID NO: 1900 - DNA, 426 bp, Nicotiana tabacum
gttggttaatgagtcagaacttgtaagtgatcttgtttccaccggaatgaatggtgtggttgtgggtgctgaagattataaaagaaaattaccaccatccccccttgagagttcaaatgagatgaagataagtaggccaaatgtctttggttttgattctgtgccgctttgggggctcaccacgatacaaggaaagaggccggagatggaagatgcagcagtagctttaccaaggtttctgagaatcccatctcaaatgttgatggatccgccagcttctcatgccctgaatcaaacactaacggcccatttatttggggtttacgatggacatggaggctctcaggttgctaattattgcccgtgagcgtatccatatggcctttagcacaggagatagatattgcgaaagaggattcacataat

SEQ ID NO: 1901 - DNA, 421 bp, Nicotiana tabacum
tgaatctagcacaaaagactggcagttcatcggtgaaaaagcacgaaagaagagacgattttccttctttcattagaagaaccagtcttgggtggatccatatcgtgattctttaaactaaaataaggtccagcgagcacaaaatttggcagaccacaatagtgagagagggcacctcccatccttcaacattcctctaccatgttttagtcaggtctctcgctcccccctagtcagtaatttgacgcatgtaacgagcaaatagataaatttgagtgatcatctcattaggaagaattttcagcattattcagatgcaggtcttctcaatacgcctgtttttttctttggtttgcgctttttctgtttctccttgagtcttacaaagtccttggcgctcttttcccattccttcctgcgc

SEQ ID NO: 1902 - DNA, 409 bp, Nicotiana tabacum
gtttgcactggtatttgggtcattgcgcacgaatgtggccaccatgcctttagtgactaccagtgggtcgatgacactgtcggacttatcctccactctgctctgatggtgccttacttctcttggaaatatagtcatcgtcgccaccactccaacactggctcgctcgagcgtgatgaggtctttgtgcctaagccgaaatcacaactcggatggtattcgaagtacttgaacaatccaccaggccgggttatgtcacttacagtcaccctcactcttggctggccattgtacttggctttcaatgtctctggccgacattatgatcgcttcgcatgtcattatgacccttacggcccaatctacaatgaccgcgagaggctacagatcttcctttctgatgctggag

SEQ ID NO: 1903 - DNA, 425 bp, Nicotiana tabacum
ttttcaaaccaaataagtttaaactgctaaatttcatcattcagcaaacacttgcacttaataagaaactaagatttataccacattgattcataattgaattataaactgatgtcaatagccatacaatgaatcctccaggaattcacgagctatgctttctggtctttcaaatcagttcagacgtgaaccgccaaaacaaggcgtgagaaatcagtcttttctgagctccatttcttccctacgaataccattcgcgtttaatatgactatctccagcctgtcaccggtgtatatatccctttcagttgctgaagcaaaacatgttttcactaaatcaatggcttctgattcagaaagcggagtaacagcatccttggcaggcagcaagagagggctgggagattttagctggttgtccagga

SEQ ID NO: 1904 - DNA, 507 bp, Nicotiana tabacum
ggagagaactcagctgcctgccctcttctctctatactcgggcgattttcggccaccacgctgccgtcaaatttcatcaccgacggccagcgactcctccttccccgcttcctgtttccccgcttctctttatctttttctctactcgcttaggttctgccgtcaatcatcaccggtcgttgccgctggaggtggtgaccagccaggcggcgaccactgtttctctcacctccctgtcaaacgccggtgaccccattaaaactggtcgatttgaagtttgaggcttaagatgtgtgcagatctggccggatttattccatctccgacgactcgtgttccttatcattttcttgtgcttattcgatggttattagctcagatccggtttcgttttggagaaatatggatagaacagatttttcggcgaccttcgtgtactgttgtagaccgttttgttttactggactggtcatcttcattttaaatctgctatagctttgatgtttt

SEQ ID NO: 1905 - DNA, 403 bp, Nicotiana tabacum
cttcattcttcaaatttctgataactcgaaaaaaaacacttcaaactttgccaaaatggttcatgaaaagcaagtgatagaggaagtatccggctggcttagagttttcgaagacggttcagtagaccggacttggaccggtccacccgaagtcaaattcatggccgagccattcccaccgcacgacgactacatcgacggcgttgccgtcaaagatgtagtcgccgacgaaaactccggcagccgtctccgcatctacttacctgaacgaaaagacaattccgtcaataagcttcccgtcattcttcacttccacggcggcggcttttgcgtcagccaagctgattggtttatgtactacactgtctacacgcgcctagccacgcgtggccaacgcaatcat

SEQ ID NO: 1906 - DNA, 557 bp, Nicotiana tabacum
ttttgctaaaacacaatcataatataaattttattaccaaaaaatggtatgttgctatctgttggcaaaagattgccattttcagtgcttcccgaagtaaataaacaacactttgcccgacaacagggacataaaaagttttaaaatcctttattcccttctcaagattctctaatgagaagctctctttctgctgtcatcttcccgcaattaagcagctcgtaaaggtggccaaataatcaaagcggtcccttattgcttagtcaactgacgaatgacatatggcagaatacctccatggttgaaataagccaactccacctcggtgtcgaaccgcactatgcaagtgaaggattttccagtatctgttcgtacagcaacgtcttgacctgggcggatctcactaatattttctggaagatcaatggtatatcgctcgtgacctgtcaatccaagtgtatctgcatcctccccagccttaaaacatagaggcacgatacccattcctaccaagttgctgcggtgaatcctctcgaagctcttagcaattacagctt

SEQ ID NO: 1907 - DNA, 361 bp, Nicotiana tabacum
cctcgtgccgaattcggcacgaggcgcaaactggtgaaggcattgctgaatgtgaacttctcaaatggtttgttcaggagggggaccaggttgaagaatttcaacctctttgtgaagttcagagtgacaaggcaacaattgaaataacaagtcgttacaaaggaaaaatttctcatattgttcatgttcccggcagcattgtaaaggttggggaaacacttttgaagattgccgttgatgaaattcctgagcctactgagacttctgatgcttcagaaaagatgacatcactggactctgattttattggctcaagtgatatcagctccgtgcctgaaaaatccaagattgatggagtgtc

SEQ ID NO: 1908 - DNA, 433 bp, Nicotiana tabacum
aaaagaacagacctatacaatcagagataggagtaacgcctaaaacctagagccctagggaaatgcaccgctgatcaacaatagagacccccccctctctaaggtcttcttcttcagagactggaagagaccttcctcacagactttaagagacctgaagattttagatcagtggcaatacacaaggaccccccctacatcgccttcttctccaagaacaccaccccctgaagatcgtcttcctagtcagccccaccaaaaccggcgacccttcatctcctccaccaagctcgctggaagtccgacatcgatctttatcagaaacacacacacacacacacacacacacgaaagcatacagagatacacaactgtttcagtttccgttatgatgatttcgatttttagatttgttaatggagttctattaaat

SEQ ID NO: 1909 - DNA, 478 bp, Nicotiana tabacum
ttttgcagcaatcgattagtatgtattcatttcagtaaaatctttacattttaacaacctttagtcataatcacaacaacaatggttttttccgttgagaaaaattcaatcagttattacaacaaccaacaatctttaagctgtccaagagcactgtccctaaaattctgtactcttgctaaacagaaatgagtgcaaaacaatcccattcctaaaccagcaccaactctactcgtcttcaacaaataacaagctggtgaacattctacccctttcccttgtactactactccccatgcttttgttatacctgattcctctgattcctctgcaattttcccatttttcaattcttcttcagtcccaagttcttcaataaaaataagcccatctggggatctttttgctccactttcccattcactttttaccaccggccaatcttccacaacggctctctctgtcttgatcttgactt

SEQ ID NO: 1910 - DNA, 479 bp, Nicotiana tabacum
gctaagccaagtcaacaacctcaaccgttcataatctacttaccccatttcattttttcctccaaatttcacctgaaaaaaaaaatggtggagctaaagaacctccgatcaaacacattaacacttgtacttgtaaatcttgctagtataatggagaaagctgatgaatctttattacctggagtttacaacgaagttggcaaagatttacatactgacccaactggtcttggttctttaactcttttcagatcattagttcagtgtctttgttatcctttagctgcatatcttgctgctcgttacaacagagctcatgttattgctattggtgcttttctttggtctgctgctactttcctttgtgctatctcctctacttttactcaggttaataatttaattctctatatatgctgttcaaattgagaaatgagtcataacccagttgataatttacgaaattagtgttgttttgg

SEQ ID NO: 1911 - DNA, 515 bp, Nicotiana tabacum
ggaaaatggagttttctggatcaccactgacattgttttgttgtgtgtttttcctgttcctaacagggagcttggcacaaggcattggctcaattgtaacgaatgacttgttcaacgagatgctgaagaataggaacgacggtagatgtcctgccaatggcttctatacttatgatgcattcatagctgctgccaattcctttcctggttttggaactagtggtgatgatactgcccgtaggaaagaaattgctgcctttttcggtcaaacttctcatgaaactacaggtggttccctgagtgcagaaccttttacaggaggatattgctttgttaggcaaaatgaccagagtgacagatattatggtagaggacccatccaattgacaaaccaaaataactatgagaaagctggaaatgcaattagacaagacctagttaacaaccagatttagtagctacagatgctactatatcattccaaacagctatatggttctggatgacaccacaag

SEQ ID NO: 1912 - DNA, 319 bp, Nicotiana tabacum
tcttcgtcgagagggagggcacgcaacagcatcagccatggttctcaagacagaactctgtcatttcagtggcggcaagatttaccccgggaggggcatcagatttattcgttcagattctcaggtgttcctattcctcaattcaaaatgcaaaagatacttccacaacaggctgaagccatcaaaacttacttggacagctatgtataggaagcaacacaagaaggatattgcacaagaagctgttaagaagaggcgacgtgccaccaagaagccttactctaggtccattgtgggtgcaaccttggaggttatccag

SEQ ID NO: 1913 - DNA, 286 bp, Nicotiana tabacum
gtgatcggccggatttgatctgacgccgaccggtgttttgccgacgttgatcaaattgtattcctgatgcagatgccgccgcgctccaagataaagcagccccaagaacactggtagccggtgccaaagattcagcttatccacgaaatgaacaatcagaaaaaaaagcttgtccaagagagtcattctctcaaagatatcatggaaatctttgtggatgaaaccacgaagaggggagagcaaaagattcttaagggatgccataaccaaagacattgttttttct

SEQ ID NO: 1914 - DNA, 140 bp, Nicotiana tabacum
ctctataatatatttgttctgcttttccttctctaagaagctctcttttctcgctcgtttgattcccaacaaccttttcaagatgcaaatctttgtaaagaccctcactggcaaaaccatcaccctcaatattgggtctc

SEQ ID NO: 1915 - DNA, 337 bp, Nicotiana tabacum
ttttgaaaccaaagcaacaaacaagatattaccaatgaactatctaatttctccttttcttttaccctttggatgggcaagggactatagctgtatacaacagtagcccagaagttaaaacatataaactgaaaggagtctagatgctagtaaaagcatacgacacatttgtttgtcttaacaacacagaatataaactgccagctagaagttatagtaactaagtggccagcacaaaatacacaagaatctaaagccatcacttggcaagcatcatgcgaacaaactcctcgtaattaacttgcccatcaccctcaatattgggtctcgtaccgcc

SEQ ID NO: 1916 - DNA, 445 bp, Nicotiana tabacum
gagggtgatatcatggacttcaagaaacacttgaaaaagagggctggactgggcgagtgaatccgatattctttgtgtgttatagtagaatgtgatggtatttcattatttcctcttggtcgttgttcagtgccaagggtaatgtgaaatatcatcaggaccgtcaaggaagctgacggagagaaagcaaaagtttcttgatcaccagtaagacgtagtaatgtttagcaaagaccacgccgagagctggtgctagagagaggaagtgatcgaaccttggtcaccatatgaatctctggatatttttttggcttagttcactatttgtattgtctactttactgtctttacatactcttaggttttggagaggattaatgacagcgtatttcttatgttagcatcatgtttgttatctattgctatattattgtacttcaaattt

SEQ ID NO: 1917 - DNA, 299 bp, Nicotiana tabacum
ccaaaacaagcgcccgtcgccaaccagaacgaagctctattccctaaatccccagaaatggaaactgctacagctttcgggtcttctttcagcatctgttacagacccaccaaggcgtctcttggtgggtcggattttgttcgattcgggtcacagtttcggaattctccctctggaatcaagctttatccctcaatttctcatgtgaagttgagtaacaagaaagcggcttttggtagcagaaaatgtacctcaatcagggcatctctatcaccctcaatattgggtctcgtaccgcc

SEQ ID NO: 1918 - DNA, 179 bp, Nicotiana tabacum
cagaaacttcctcagagcaatcttccggaaacttctgagccttcaatgctcctctctgagaaggctagaagtgctctttatgctgcattaccggtgcttgtgcaggacaggaagtgggtcttgttatacagtacatggagaaatggaatatcaccctcaatattgggtctcgtaccgcc

SEQ ID NO: 1919 - DNA, 103 bp, Nicotiana tabacum
gtttcattttgtgacgcgtgcaaagaaagcggttcaaaatgcagatttttgtcaaaactttgactggcaagaccatcaccctcaatattgggtctcgtaccgc

SEQ ID NO: 1920 - DNA, 281 bp, Nicotiana tabacum
attttttgaaccgagactcagaaaatctctccttagaatctctgaaaccttccttcaggttagaaccaaaacaatattaaaacaaaaccaaagattctgatttaatatcaaaaatagattattttttcttaaaaaatgcttcttcgaagctcttcaagtcaattattgaagcattcatggtcaactccacactcatccccggagccagacttcatgcttcacgtaccaaaacagttctcaagatcaacatcatcaccctcaatattgggtctcgtaccgcc

SEQ ID NO: 1921 - DNA, 118 bp, Nicotiana tabacum
gttgtttcagcctatgctcatgttaggcatcacacttggtgtttctctaagtgttgtcttcccttattggctcatcactgtcctcatcatcaccctcaatattgggtctcgtaccgcc

SEQ ID NO: 1922 - DNA, 371 bp, Nicotiana tabacum
gagggtgattgaccgcctgaactggatgcgttatgtgcagggaccaatactgcgcgacgcgatgaaaattatcggcgaaatcgatctgcgcttaatgctggcgcaggcgctgcatatgggcgatgagtgccataaccgcaataacgccgggacgacactgctgattcaggcgctgacgccggggattattcaggcgggttattccgtcgagcaacagcgcgaagtgtttgagtttgtcgccagcagcgactacttctccggcccgacgtggatggcgatgtgtaaagcggcgatggatgcggcgcatggcatcgaatacagcaccgtggtcaccacccatggcgcgtaacggcgtcgagttccggcctggc

SEQ ID NO: 1923 - DNA, 132 bp, Nicotiana tabacum
agacccaatattgagggtgattggtgaaagcattctgcaacaagtctgtaagcctgtcctgagctttacttatttcacgtggtttgacgttatagtttttgttccagatcagctgccttgtagccatgaatc

SEQ ID NO: 1924 - DNA, 432 bp, Nicotiana tabacum
ttttatgaaaaacggggtaattatacagttccagtgctgaactattctgaaaactgagtaacatacaaataaaatctaagcaagcaaaaacggaaatatgtaactgagaaaaatgtctctcccgcctgccctctaacaagtacattcaactagtgctgctcaagtaatcgaatgcagttcaatatcaaaactatctaaaacaatcctctctaagcataataacgaaagatgggctggtttggagggtgacaatttgttgacttccatgaatgccgaatctgtccatcccatcacttcaatttcaagtcagcttccagaggaaatatctttccgcggtgattaaagatcatgaaatccagattggcaggcaaagcgaccaccctgttttcctcagattgaggatggattgaccttgaattttcccaggagcag

SEQ ID NO: 1925 - DNA, 437 bp, Nicotiana tabacum
ttttcaagaagatattcgatattcatatattaaaactggcataaaatgcaggtatagcacgaatgcatactggcttcgttcattctccatgtactaagataactagaggccaaactgacacaagacaaacatcctttgatacaatgaaaacataaaagcatatcacttaacaagcttgtccctcatttaacaccaataaaagctcaattctttctagagatgccaagcctgccacggaaatcatcctccattaggggaataccattgcgcagtttgatcgttggttcccagcctagtagttctttcgcctttgtgatgtctggctttctctggcgaggatcgtctggtgtattttccaccgtgataatttgcacttccggattgataagctccttcacagtctcagcaagttcaagcattgtgaattcacctggatt

SEQ ID NO: 1926 - DNA, 378 bp, Nicotiana tabacum
gccatatttaatctagttttgcggacttctttgcaagccacattttgcgaaggtaacttcttcttcttttgtgctttcttcttagttgtctatttttttcctttttttgaaggtcaaacaaaaaggagtgttcttgtttaacgagaagatccatacatgaagaagacaatcttgggtgtaaggggatgggtactcatccttacccgaatatcggagagattactcttatggcccaactatcagagagattaatctcaatgtggctcgactaccggagagattactctcaatgtggcccgactatcggagagattactctcaatgtggctcgactactggagagattactcttaaaatgacccgactatcgaatagata

SEQ ID NO: 1927 - DNA, 418 bp, Nicotiana tabacum
gcaaaaagaaatggctgatgaagttgtccttttggatacatatgtgagcatgtttggggtgagggctaggattgcactggctgaaaaagacatacagtatgaatacaaagagcaggatttgttgaacaaaacccctcttctcctacaaatgaacccaattcacaagaaaatcccagtcctgattcacaatggaaaaccaatatgtgaatccctaattattgttgagtatatagatgaagtttggaagaataaaacccctttcatgccttctgatccttacatgagagctcaagctaggttttgggctgattatattgacaaaaagatttatgagagtggaaagaaaatgtggacatcaaaagtggaggaccaagaagcagccaataaagaattcatagagtgcttgaagttattggaa

SEQ ID NO: 1928 - DNA, 443 bp, Nicotiana tabacum
ttttattgggagatttcttcttcaaaaaaaaaaagaaacgtttacggtacaataacactcaaaccaaacacaataaaaatagttttccaacaacaacaacaatattacgcctcagtcccaaacaacaagttgggaccagtttcctacggccccaattttattaacctgctgattcataggccacaacaactgttacgcctcggtcccaaacgagtcgggatcaattttactgtttgtgcaactcaagtgccttagaccaagcaggcctagccaaaatatcagcacaccaagccttaacatgaggtctagcatcaaacaaattcttaactttagtccccattaaataatgcacaacaggtgcatggtgtaaatctgctaatgtaaaactctcaccacccaaatattttgactctttaagtcttgattcatacacatcaagaatt

SEQ ID NO: 1929 - DNA, 386 bp, Nicotiana tabacum
cttatattgcttaactctctttcttattctctttaattttcaaatggctcctcttcaagttcttgcaatatttttcacatctttgattttcatgcaaatttatttgggaaatgctcaaacatttatccattctaaagcagcttattatccaaattcagaagaaaaaggaacagaaactggggcatgtggatttggtacttttggagcaacaatcaacggcggagatgtatccgctgcatctgatctttatcgagatggtctaggatgtggcgcatgctatcaggtgaggtgcacaaacagtaactgctgctctgataatggagttactatagttataactgaccatggagcaagtggtggcacagactttattctaagccagagag

SEQ ID NO: 1930 - DNA, 490 bp, Nicotiana tabacum
ttttaccattaaataaaattgtatatatatatttccataaaaaaaaattatgaataacaattactacatgtgatacaaaactgggaattcagaaagattaataaaacataagacatattcagtaatctagaaagtaatgtttataaagcttattcaagaattaacaacagtaaattaaacacaaatagacactctttttatcttctctggaagttgaatgccttaatacccaaagcaaatgtgaaggcgaaaacaactgcaaacgcaacgatcacagctgcaacaactccaagaaaatcatgcttaaatcctaagttacttctcagaaattgttccacagtttgattttgatcaataagtggatcttgaaggtctccgaattgagatgcaaccaaaccatacaaggtccatgcaatagggcaaccccagtagtaccatctccaccatattggaatacgaggtcgtggaacgatgaaacctgagaagagat

SEQ ID NO: 1931 - DNA, 488 bp, Nicotiana tabacum
attttgtcttggtctacaaattgaatatatgaaagatggaatttttgtccttcaatcaacatacactaaaaagattttaaagagtttctatgtggataaaacacatccattaagtaccccgatggttgtgagattactcgatataaataaagatccactctgacctcatgaaaataatgaagagctttttggtcctaaagtaccatatcttaatgcaattggtgcgctaatatatcttgctaacactacaaggcatgacataactttctcagttaatgtcttagcaagatagagctccgctcaaggagaaattggaatgaaatcaagcacatattgcgttatctaagggggattactggtgtgggcttattttatggcaatgattgcaatatcgatctttttggttatgtcgatgtaggttatttatctgacacacacaaggcttgatctcaaacatgttatgtgtttacatgtgtggcactgtcata

SEQ ID NO: 1932 - DNA, 369 bp, Nicotiana tabacum
ccgaaacaccactcaatctgacccaaaatgaaaaaagaaaaaggaaaaaagagggatgaaaaatagaaacaaggaagaatgaaaagaatagacaaaagctgaaaatttggtacgtggaaaatacaaggaacaatcacgtgtgttatgagctgaacggagactacccatcatgtgtaactccataactaccagaagtttgttcagtaagatggcgaaacaaattgtacaaaatggtggcaccgcggtagaaagggtcatcaaactaccataatagttgcaagaagaattgcaacagagctcatgagaatgctagcaacgacggaggattggccatttggaggagtgggagcaatagctgacccattgtca

SEQ ID NO: 1933 - DNA, 427 bp, Nicotiana tabacum
ttttagagaagtttatgtaatatttaaagacgtgttacagaaacctcataagatacgtaattctccctagaaaaaggagtgcaagttttccataaataccaaaacacttgacacaaaataacagtcagctttcctcccactatacaaatcaagcatcagctctttactccatccaccaaaaaatattgcaaaactacaacattgcaatctatattgagatagtatttgctatctcaatttgccaaaagattacaacatcaagaactgcagatgctttgattccacataattcagaaccctcttcctcttaagagatttctaaccaaaaacacctactcactataatacaaaacgtcatccttctattttgtgcctcgaatcatgctactctacatatgtctgtcgacacttactaacagctacaaaa

SEQ ID NO: 1934 - DNA, 412 bp, Nicotiana tabacum
ttttaggatgaaaagacagtcatcatatcataatatgacctaaaaaaacagaaagagctaattatgcataaaatttattagataataaggacagtaccaagtgttgtatatgtaatatgcagagaggaattgaaattagacataattagttctggtatgggcagtgttgagtggtggttttatcattattgccctgttgctcaatgttagactcagaaattggtggtcccttaagtagtccagcgaacagttgtgctggatcatagtatatctcaacatcctctgctcttagagattcatctaccttcattattccaacgccataaaactggaccatctcacgagtaggggcatgtccctttaaaaggtccttcaaagaaaccccaatgtctgaatttgaaagtcacaacag

SEQ ID NO: 1935 - DNA, 361 bp, Nicotiana tabacum
ttttgaaaatatagaggtaaatgaaatttttttttatggtggggggatgaagttctaatggcctatggactaaatattagtaatcactaagatatctacaatctcaattaaagtgacaacactaatcacataatcacttgtgtcctttgttccatcaaatgtgcatgaaattgctgagtaatctttctcgttcctgtgatgctgcaactgcaataaaatcaatcaaacctcttcctttgaacctgaagaagaatatctctctcccccttttactattgctgaatatcacaatccccctgttgcatatacattttttactggtgaaatttgtgatcgagcaacgaccttttacagccattct

SEQ ID NO: 1936 - DNA, 429 bp, Nicotiana tabacum
gtcgtccggacttgcgttaccctagagccgcccctgtcacagagtaatcgtcgtccggtagaagatgaggccgatattgatgaagggccacgaaaggccattgacgtttctgaaatacaacagagacggggatctgctcttctcttgcgctaaggaccatacccctaccgtttggttcgccgataacggcgagcgtctcggcacttaccgtggtcataacggcgctgtttggtgttgcgacgtttccagggattcggccaggctaataacaggaagcgcggatcagagtgcaaagctgtgggatgtccaaactggtacccaactgttcacattcaactttgattcccctgctaggtctgttgattttccggttggtgataagctcgcagtgatcaccactgatccttttatgggactgccatctgctat

SEQ ID NO: 1937 - DNA, 447 bp, Nicotiana tabacum
gtttcctatcaagacaaacttgcaacatagttttgaacataaaaatggattcttattcatatgcagctatttcttcttcttcttcttcctctaattctattccatatcaacaagaagtaaagaaaaacaaagcattaccttcataccattcctcacttcatggagttcgtaggctcccattaaaaccaatgacaaaacaaccaattgcaccgttgccaccaacacctccaaaaatctaccgagtggaacctgttaatttcaaggaagttgttcaaatgctcactgttgcacctgagtttcaatctgttttcaataattcgagctctgattccgactctagttctaataattccaattcaaggcgtttgaaggatgtggctcctcctccacttgatctctcaccagtttcattaccaagaaacagcattgctgcagaatggcgagagt

SEQ ID NO: 1938 - DNA, 394 bp, Nicotiana tabacum
ctaaaatctgtccaaatatctcatcttgtttatttagagtaataaattactaactacaaatggcaggaacaagtagttatcctcctcagatggctgtgccgccggcagcaaatcaggttgcaattataagcccacagttctgtgctccatatccagttgatttgaacatcgtgaggaaaatgatgactttgtctgaagggagtttcggagttaccgatgtcaacggcaacatcatttttaaggtcaaaggaaagctctttagccttagggatcgcagagttatggttgatgccgctggcaaccctctcgtcactttccaacaaaagatgttgactgcccataggagatggcaagtataccgaggagagagcaccgataccaaaaatttcctttt

SEQ ID NO: 1939 - DNA, 497 bp, Nicotiana tabacum
ttttcacgatgctcaactacacatttcattatggagacaggtaaatacatactcagttaagtttccaatcttttctaccgcgccaacttcctatctaagttacaaagtatattacttctgagagctcaattttaatatacatttgggcacaaaatcggccaaacttgcatcaccagactcggtcaacagcaagaaacatttaaatgaatagtatttacatgggacctcgtcaactcgttaagactgccaataagaaactggcacgaatccctccaccacatcagatagttcaaaagcaaattaccaggcatcgttcagggtaaagtgcaatccaatttacctactcagatgaccccgtgtgtaaggaaaggatgtctcagggcttcacgagcagttaacctttcagatggatcataacgaaggagtccttgcaagagattaataagatctccagcagaatgatccacatgctgcataattatattctgaaggcgagc

SEQ ID NO: 1940 - DNA, 501 bp, Nicotiana tabacum
ttttcaaaaccaacaggggttgatacttttgctgattacacaaaagcacagcttcaaaacataatgaaaaccatagatccaaaccagcaacagcaacaagctctaacatcttcagtcaacacttcatcttggatgaaggcttgtaaaaccaagcgatgttaacttgctgaccacacagaaccacagcttcaaaacataatgaaaaccacagattcaaaccagtaacagcaacaagcttagagtttcacaaattcctcaccaaagtggcatcccggagaaattacctcatgcagaaagcacatcaaacacaaggctatcaaatcttcaacagcagcagcagctccatttcttgatggacacggagaaaactaagcttcatattaactagaagcagcatatacatcaagcgcagcacgaaaaatttcaacttcagccgccagcaccaatgtgcctccagcttattggaagccacagccaccccccatcatttgatatgcatca

SEQ ID NO: 1941 - DNA, 304 bp, Nicotiana tabacum
ttttagagaagtttatgtaatatttaaagacgtgttacagaaacctcataagatacgtaattctccctagaaaaaggagtgcaagttttccataaataccaaaacacttgacacaaaataacagtcagctttcctcccactatacaaatcaagcatcagctctttactccatccaccaaaaaatattgcaaaactacaacattgcaatctatattgagatagtatttgctatctcaatttgccaaaagattacaacatcaagaactgcagatgctttgattccacataattcagaaccctcttc

SEQ ID NO: 1942 - DNA, 455 bp, Nicotiana tabacum
ttttaactcttaaaatccactgtctggaataaaattaaaagtatttcctcaacaactaatactacaacctgcttccgcctatcaagttgtacattcttagcaacaaagtttcactggctttaaaggctgttgaagtgaaaaacctcccacttcaaaaaccaatagcgtgcataatactgtaaccttggatactgcccgctgttgagccaattatgagttgcatattccagttacagtacataacagaagtctattcagacggagcaataaaaagtaataaataaaaaactgatggatgttattttatcgcttcccacgactccccgagccaccagacctcggacctggaaacttcgagaactgcaatcgcaagtaggccgaatcggggtcatgttcatccattttgtaaccttgcaatgcactcaaagcagtagctgcacaagctggatctacga

SEQ ID NO: 1943 - DNA, 328 bp, Nicotiana tabacum
ctcacctggtgatacacctgatcaccctgctgttggtggttctgctgatggttatgcttctgaagactttgttgctggttcttcctctagccgtgaaaggaaaaaaggggttccctggactgaggaggagcataggatgtttctacttggtttgcaaaaactcggtaaaggtgattggcgtggaattgctcgtaactatgtaatttctagaacgccaacgcaggtagcaagccacgcccagaaatatttcattaggcaaagtaatatgtcaaggagaaaaagacgctctagcctgtttgatattgttgctgatgagtcgggggacact

SEQ ID NO: 1944 - DNA, 323 bp, Nicotiana tabacum
ttttcgacccaaattcaattgcaataacggagaagtgggtttaaagtagcacatatatatacaggcattcagaagtggagtttcttctctgtaacttttttactgggtggttcctgggaagagtatttcaccttaaacaaacactgcaacaaataccaaatcacagaaaggaccgacgaacagcacacaaaagtaatctctcattcccctggtacaattcacctacatgcatgtgatggcaactgctacctaaacagacgcatttgcagcaagagcagcaaggactttccacttctgcgacttggaaaggttccgccacattt

SEQ ID NO: 1945 - DNA, 437 bp, Nicotiana tabacum
gaggaggaacgtatagctgcaagcctgcaactccctgcgaatttggatatatacacagagagagaaggggaatggagaatcttcgccaaaggcgagcaaaaaatccctgttctcttcttctttcttttgtattgatcactgccctctcttcatccatatccgcaacttcacctcttcctcgctcagatcagggtacagagcagcatgcgtcaagtcctgaacacgacaagccacatgttcatgaagttcattgctcccgagaaagaagccggactgcttggaaagttattgaggagtacttgatgccctttgtggaaagagagaagtatgagcttcctaggcagtgtagacttcatccaagtaatgatattttcagagatcaagaggaacataaaatccatcttgacgtgaatgagtggaaatgtggatactgcaga

SEQ ID NO: 1946 - DNA, 328 bp, Nicotiana tabacum
ggaatgccagcaagcaggtctgcacaaagaatactggtgacttggaagttcagatggtaaatcaagcagaaccagagttgcatgaaaatgctgctgttagtactcaaggtacagaatccggagctgcacctattggaggagatatgactgagcggagtgccgttactggagttgggcagcttacttctggagtagatagttcagccagttgcttggagcagcaaataacatgtgttacagaagcagaccaaggccggggtacaaacacaggggcagaaatttctttatgtatttgattttgcattgttccctgttgatggacttcccc

SEQ ID NO: 1947 - DNA, 413 bp, Nicotiana tabacum
ggaacaatgcaaggactatccgtatgactacgactattgataaaaatcaatggtgtggacaattcaagcgatgcaatgaatgcaagctgcaatcggaatgcatggttaagcctgaagaaatgtttcctgtaatggaagatgggaaatatgtcgataaatgggcaatacgaacgacggcaatgattgccacgagaacttggtaaacagaacaacaaagctgcctgatagtggcctttatttttggcataaataaccagaataaaccactgcactgtgtattcattccaacgagtgaatacacggagcaatgtcgctcgtaactaaacaggagccgacttgttctgattattggaaatcttctttgccctccagtgtgagggcgatttttatctgtgaggatatgaacagatgtc

SEQ ID NO: 1948 - DNA, 359 bp, Nicotiana tabacum
tggctaataagattgttgctgcagtgaagcagctggaaggaattgagtaaggcgagaagcaattcagaatggaggttgcaactataagtagcacacaccatttgaatttggtgagattaattgggttttgttctgaaggacgccacaggctactggtgtacgagttcatgaaaaatggttctcttgataagttcctctttgcggaagatcattcgtcaggaaagcttttgaactgggagcatcgatataatattgctttggggacagcaagaggtatcacataccttcacgaggaatgtcgagattgcattgttccctgttgatggacttccccaatcactagtgaattcgcggccgcc

SEQ ID NO: 1949 - DNA, 453 bp, Nicotiana tabacum
acaatgcaagagcaaagacgaaaacatgccacacatgaggaataccgattctctcattaacatattcaggccagttatctgggcttaaaagcagaagtccaacccagataacgatcatatacatggttctctccagaggttcattactgaacactcgtccgagaataacgagtggatccatttctatactcatcaaactgtaggggttgtaatagtttatccgatttctcgctgtaggggtacacgagaaccaccgagcctgatgtggttaaaagacaggcacaatctttactaccgcaatccactatttaaggtgatatatggaagaagaatttgaagagttcgaagagcatcctcaggatgtgatggaacaataccaggactatccgtatgactacgactattgataaaaatcaatggtgtggacaattcaagcgatgcaatggatgcaag

SEQ ID NO: 1950 - DNA, 357 bp, Nicotiana tabacum
gagatttcgtacagagagaaaagaacatgaatggagtcgctccgccgaggagttcgggttccgacggtggcgccgtcgaaagtacgacggttctccgggcttatcagacctggaaaggcagcaacaaattttgtcttcaaggaaggtttatatttgggcctgacgtgaggtcactctttatgactatcttccttatagttgccccagttgctgtgttttgcgtctttgttgcaaggaaaattgtggatgactttgctggtcattgggggtggtctatcatggtcgtggcggtcatttttacactatatgtcttagtccttcttctactaacatctggaagagatccctggtataatt

SEQ ID NO: 1951 - DNA, 452 bp, Nicotiana tabacum
aaattattagaaggagaagaagaagcacttttcataaaaggttcaagtgcttccattagttcaccaccagaagtaataggttctgatgttgagtgaacatctacaggtgtactattccaaaaatccattgctgctgccattacctaaaatacctgttcacaaaaaaagttaaaaaaagtaacctgtttcttgtcaaataaaagaaaacaggtgagtgattttgattacaaatatataaacagaaaaatggatatcaaagaggtcttcaaataacaacctcttttttctcctgtgattaaaaggaaaaaaaattcaacctttgagggacaactaataagccctctaagctgattttgaaagaaagaaaaaaaggtctgaaactatactgagttaattattactagatctcgattctgaaaacacctggcttataagaaaatatttcgtctaat

SEQ ID NO: 1952 - DNA, 462 bp, Nicotiana tabacum
agaaatttgcaagaaattatgatacagattcacattcaaagccagtatataactagagattaaacatggaaagcacagggccgggcatattacaaatatgaaaaaccatgaactagttaattacttccattctttcatttcacttcttcgacttcatccaatgcgtagttgttggtagatacattagcatagttcactttgttgaaccttactacgactgggtagcgtgtgtttggatcctgatcaacagctacaactgaaccaacacccttgtaccagtaagactccttccttaaaactctcactttggttcctctcttgggtccaatcggaggtggcttggcagctttggcaggaggagcttcaccttcagcggtggcggtagcagctggcggcgcagcctcttccgcggccctaacaacgagcctcgggaagttggtggtggtgttgttcttggaggag

SEQ ID NO: 1953 - DNA, 314 bp, Nicotiana tabacum
ttttgacggctgaagagcactttaggaaggctactaacagttgacacaacaaaagattacaaaccatttactcggtgatcaaaatgacaagtaccggatgctcctatccagatcaaaatgtcaactaacagaaacacaaactagtttattcaactatagtttccatagcaaaataagtagacaccttttgtagccaagcacctcggatccaactgacactaagacacagaaagcttataaaatggataatggataggccaaacaacttctattggatataagttaacagtactgataatattgtccatgaaatg

SEQ ID NO: 1954 - DNA, 310 bp, Nicotiana tabacum
cgggatccaacgctgatgaaactcgtggggcatgcaagaggtgtgggcgggtaggccacctcacattccagtgtaggaattttgtgagtgttaaggatgataacaaggataaggatccggaggcgattgaggctgccgtgttgtctggattggagaagatcaaggggtctaagatgaagggaaaagcagaaaatgaggagagcagtgaagaagaagaggagagtgagagttctgattcggattatgattctgaaatggagagggcaattgctgagaagtatgggaagaaggtgagtaggaagttgaagtc

SEQ ID NO: 1955 - DNA, 216 bp, Nicotiana tabacum
cgaagtgtgacaatctctccacggacagcatactcacagttcaaaaccttggggttaagggtgtctagagtgacaggtgtggatgaataatcggaagccattgaatcaggagaaggagaagaaggctgaagagtggacaagaaacgaaacgcagcaggtaatggggaagtaagaggaggagaagaagaacaaatagaagtagtagttctagttctg

SEQ ID NO: 1956 - DNA, 236 bp, Nicotiana tabacum
aagtgtgatggagcggatacaggtgtaacaacagcagttggaggtgatgctactggtgcaactggtgatgcctttggtgtagctgccggagaagctcccggagcctgagcaaaagcagatccggcgaccaaagcgaaaatgaaagcgaacatcatccttgagtaagccatttctttctctctctagaagcttttcgaaagctctgatttgaagtgttgagcagtttttagagagcg

SEQ ID NO: 1957 - DNA, 365 bp, Nicotiana tabacum
aagacccaaattctcgcagtgaaaaccaaaagaatgggtagcagccaagcagcagtatcattcctcacgaacgttgcacgcgccgccttcggtctaggcatcagcgccacggttctcaactcctccctctacaccatcgacggtggtcaacgcgccgtcctcttcgacagattccgtggagtcatcgacgataccgtcggcgaaggaactcatttcctcgtcccatggcttcaaaaacctttcatcttcgatatccgtactaggccccacacattttcctccgtttcagggacaaaggatctccagatggtccacctcacacttcgcctcctttgccgcgaatcactagtgaattcgcggccgcc

SEQ ID NO: 1958 - DNA, 545 bp, Nicotiana tabacum
tgtgaaccggttataaatctgctctttcgcggtatccgtaccgatttcggtaaggtaaaccccgtttttgtttcgcttacgtggcatgctggccaccggcttgccgtagacggatgcccctttaacggggatcacccggaacagcccatgttttttcgagcgttcatacacaatggtcgggtcaatcccgccagtatcccagcagatacgggatatcgacatttctgcaccattccggcgggtataggttttattgatggcctcatccacacgcagcagcgtctgttcatcgtcgtggcggcccataataatctgccggtcaatcagccagctttcctcacccggcccccatccccatacgcgcatttcgtagcggtccagctgggagtcgataccggcggtcaggtaagccacacggtcaggaacgggcgctgaataatgctctttccgctctgccatcacttcagcatccggaccgttcgccaattttcgcctcccacgtttcacccgagcgtggtgtttacgaaggttttacgtttttcccg

SEQ ID NO: 1959 - DNA, 425 bp, Nicotiana tabacum
cgtaggaaagaaattgctgcctttttcggtcaaacttctcacgaaactactggtggatccctgagtgcagaaccatttacaggagggtattgctttgttaggcaaaatgaccagagtgacagatattatggtagaggacccatccaattgacaaaccgaaataactatgagaaagctggaactgcaattggacaagagctagttaacaaccctgatttagtggccacagatgctactatatcattcaaaacagctatatggttttggatgacaccacaggacaacaagccatcttcccacgacgttatcatcggtcgttggactccgtctgccgcggatcaggcggcgaatcgagtaccaggttacggtgtaattaccaacatcattaacggtggaattgaatgtggcataggacggaatgacga

SEQ ID NO: 1960 - DNA, 363 bp, Nicotiana tabacum
cggggaaaatattgtacacacaatgaagggaacatctggggataaatttgagttcaaggcccctcggagtgggatgtacaagttctgttttaagaatccttattcaacaccagaaactgtctctttctacatacatattggacacatccccaatgagcatgaccttgctaaagatgaacatttggaccccattaatgtcaaaattgctgaactaagagaggcattggagtcagttacttcagagcagaagtacctaagagcacgtgaagctcgtcatcgtcatactaatgagagcacaaggaagcgtgttatattttacacaattggagaatatctgctgcttatattggctagtgggcttca

SEQ ID NO: 1961 - DNA, 288 bp, Nicotiana tabacum
tgctagatatgacaggaaacccttcccaaccatacacttgggccttcaagaaagagatcactcaactaggaacataatcagtcacaccacgccactcgatccgcggcacacccgacatgactgtcttagcatgatagtctagaatagcatgacacagagatagtcaatccatgccccaaaatgacatcaaaatccacccatgctcaatagcaatagatccactttgggtctccagacccccaattagtcaccacacatgaccggtccacacggtctacaaataatagt

SEQ ID NO: 1962 - DNA, 619 bp, Nicotiana tabacum
gtgtccggcgacgagcctatacgtgagaagatctttcatttcagcagagaagctattttgaagctgaaattcagagccaacaacaaaatgacagttaacggtcaaaacggaagaactaacggaaagataaggcccgttaagaacgagccggctttgaaaaacggctaggcttcagaaatttcatcattccagtcgttgtgtgctcagttgtggagatccgtgacgcgggccaggaaattggaggggagcaaaacgacgacgtttaggatggcggtgaattgtcgccatcggatggagaaaaggatggagccgctctattttggaaacgcgattcagagcatcccaacggttgcttccgttaatgagctgttaagtaacgagttgaattggagcgcgaatctgctacatcagaatgtagtggccgcatgatgatgctaccgtgcgccggggtgtgaaggattgggaaagtaatcctaggttatttcctttaggaaattttgatggagctatgatcactatgggaagttcacctaggtttccaatgtcgataatgatttcgggtggggcccgcccgtggctgtccgaaagtggcatggctcataaattttgacggtaagat

SEQ ID NO: 1963 - DNA, 399 bp, Nicotiana tabacum
catgggccatttacaccagacgcgatggatccatacacagacaaaatgaatatctggcagaaaatcgacaactggttatcagttttgtacattaagccctcgctctggaagatacacgagaaggcggcgagagaccatttcagggaaacatacggccccaaatatgaagcccttgttgatggatgctggacaaatatcagcctttcaatgatttcatcaaactttttgtactactatccgcgtcttcacggcccaaatgtcattgaattgggacctctgcatttgaagacaccagcaaaacctcccaaagaatctgcaagattggttggacggggcagaaaaaggagtaatctacttcagtcttggtagcaacatgaaaagtaaagccttaccagaaaa

SEQ ID NO: 1964 - DNA, 200 bp, Nicotiana tabacum
gtcaaccgaggatcaggtgaggagccttgacgaggaataaagctcatgagttggaggggaggttggtggctatgggagcctggaggagtagcggggatgctagcgagatgtggacagctacatcagactgtataagaaaggcggcgagagaggtactaggggtctcgaagggttactatgccgggcacccccgccgccca

SEQ ID NO: 1965 - DNA, 403 bp, Nicotiana tabacum
acgagcctatacgtgagaagatctttcattttagcagagaagctattttgaagctgaaattcagagccaacaacaaaatggcagttaacggtcaaaacggaaaaactaacgggaagataacacccgttaacaacgagctggctttgcaaaacggtgcggctgtgaagggtacggcttcggagatttcatcattccaatcgttgagtgctcagttgtggagatccgtgacgcgggccaggaagttggacgggagcaaaacgacgacgtttaggatggcggtgaactgtcgccatcggctcgagcaaaagatggagccgctgtattttggaaacgcgattcagagtatcccaacggttgcttccgttaatgagctgttaactaacgacttgaattggagcgcgaa

SEQ ID NO: 1966 - DNA, 368 bp, Nicotiana tabacum
ggtcaagagtcagtcgtggttgaggggaggtgccgaggtggggtcactccatatgacaggtaaataagacggcgtgaagagtcaagaggtaacagcagtggcatcttgggaattttatacacggttcccctgcattgcttgtgttgttttggtgaaagtatggaagttattatcagtgaattagcttctcagagtgcggagtcccttttccagttagcacatgagatgtatctgcagtctgtctgaaaagagtctgtctatagtatttcgagttgcagggtgaatgtctatactttacgagtcattttctataaatattgcaaaagtacatgtttgagcaattttgattattctttgtgcccttaaaa

SEQ ID NO: 1967 - DNA, 509 bp, Nicotiana tabacum
  misc_feature (11)..(11): n = a, t, c, or g
cggcgcatggntcatttacaccagacgcgatggatccatacacagacaaattgaatatctggcagaaaatcgacaactggttatcagttttgtacattaagccctcgctctggaagatacacgagaaggcggcgagagaccatttcagggaaacatacggccccaaatatgaagcccttgttgatggatgctggacaaatatcagcctttcaatgatttcatcaaactttttgtactactatccgcgtcttcacggcccaaatgtcattgaattgggacctctgcatttgaagacaccagcaaaactcccaaagaatctgcaagattggttggacggggcagaaaaaggagtaatctacttcagtcttggtagcaacatgaaaagtaaagccttaccagaaaatgtgcgggaaaactttctgagatttttcagagagctgcccggctggttacagggtactgtggaagtgggagctcgatggcaaaatacccggacacccccgccgcca

SEQ ID NO: 1968 - DNA, 161 bp, Nicotiana tabacum
cggcaagccgttacactacaaaggatcatcatttcaccgtgtgatccctggatttatgtgtcaagtaggtgatttcactgccggaaacggtaccggtggtgaatcgatctacggcgccaaattcgccgacgagaatttcgttaaaaagcatactggacctg

SEQ ID NO: 1969 - DNA, 501 bp, Nicotiana tabacum
ctagagggcaaaaggggggatcaccaagaatctggtggcaaaaagtcccctcctagtttatggtttacatactctgattcacaaagacatgtatagcgctagcacttataacttgtctaaaattctaccacctattaatttcatccgataaacggtcatttacaacaaatagtatataaagccagatacctgctttatatgattttgcatgtattgatgtatggcgactttcaactccaataagttagagtaactaccaacgcagccggtgaactttctacacgttccccaattttgcactcccccaggaaaacctaatcagccgagtaagttcacaaaacaccagagtccaaagctttgattgttttgcgtcgccacatagcagttcctggatcaaacctcagctcccatgttggccagtaatgtaaatcctgcttcaatgtaagtctcgaggcttcccattcaggtggactgttcgtacccggacaccccctcctccaa

SEQ ID NO: 1970 - DNA, 559 bp, Nicotiana tabacum
cggggcccacaccatcggaatcagccactgcacttccttcactgaccgtctcttccctaaccaagacccaaccatggacaaaacattcgctaacaaccttaaaaccagttgtccaaccgcgaactccaacaacacagtcgacatggatatccgaacccctaatttatttgacaacaaatactacgttgatctcatgaataggcaagggcttttcacttctgatcaggatttgttcactgatagaaggactaggggaattgtcgagagctttgctaagaaccagtcactgttttttgacaagtttgtgattggtatgatcaagatgggacaattaacgtgttgactggtggagatggtgagattaggacaaagtgtgataggaggaacaaggataagaaggttgatattgctaccgtcgttgaagatgtggaggaaactttctctgctttgttttaagtttaataatcctttgttttcatgtctgggagaaaaaacttttttatgcttttttttttgtaataataacgaagtatcttatatgcttagttaatattcaaaa

SEQ ID NO: 1971 - DNA, 291 bp, Nicotiana tabacum
cggccgaggatcttcgtaagttgttgttttgttgatatgattaatgtaatagggtcttccatctgcgtcaatagcctgtttccaaccataaggcaatccaccattgacgtcatggacccaagcttcggccggtggtacccaagaggacgtctgagttacatgattgcaatagtagagtcgattgtcgtgtgtcacgtgaacgctccagccgggattgagtttattttggatctgttgcaggttttccttccgtttctcaaccgccgctgccccggacaccccctccgccca

SEQ ID NO: 1972 - DNA, 399 bp, Nicotiana tabacum
  misc_feature (236)..(236): n = a, t, c, or g
ttctcgatggtcgtattaaataaaataaaaaatagtcaaaattttaacaaccccaaaagacttttttttcgtttctgccccaatcttccccaaatttacatacaaaaccctacccaccgtatctctattctctgctctttagtcttctccaaatgtcaattccaccctttccactacctcgaaattacaaaagagcccctaaatccctaagctgtttatccttttctctgttccgntgaatcgaacaccatcattctctcgccggaacttccagctccggcgccggcgatcgtcccttcaattacatgacgatgctctccttcgtaagttacaataaccatttttggatcatcggttgccctctccacatgctttcttgccggacaccccctcctccca

SEQ ID NO: 1973 - DNA, 347 bp, Nicotiana tabacum
  misc_feature (109)..(109): n = a, t, c, or g
  misc_feature (198)..(198): n = a, t, c, or g
cggggcgtaagtcccgactgccgaggtgtaagtctcacggaactaagccccacacataagtcccggggcgttttacgagtgctccgctccagggcgagccccgggcgangtcccaattctgccttttaaaacagagctaattactatagtacaaagtaattttattctgtgcagtggagcatgaagtactcgaaagangaaagaggaagactacgatgcattatatcagcaacagcaactgccacagtcacagcagcaacagcaatcatcttccagccatcggcgcagcactagtagggatcttgatcaacaatttgcaaacatctccttgaaacataaagacggta

SEQ ID NO: 1974 - DNA, 491 bp, Nicotiana tabacum
cggggaaaatattgtacacacaatgaagggaacatctggggataaatttgagttcaaggcccctcggagtgggatgtacaagttctgttttaagaatccttattcaacaccagaaactgtctctttctacatacatattggacacatccccaatgagcatgaccttgctaaagatgaacatttggaccccattaatgtcaaaattgctgaactaagagaggcattggagtcagttacttcagagcagaagtacctaagagcacgtgatgctcgtcatcgtcatactaatgagagcacaaggaagcgtgttatattttacacaattggagaatatctgctgcttatattggctagtgggcttcaggttgtgtatatccgacaactgtttagcaagtcagttggctataaccgggtttgacaaatttaggttgtagcatagtgttttttcacctctgttctacaggaacttgagttgttttggtcagttgagg

SEQ ID NO: 1975 - DNA, 215 bp, Nicotiana tabacum
  misc_feature (9)..(9): n = a, t, c, or g
cgggtacgnaacagtccacctgaatgggaagcctcgagtacttacattgaagcaggatttacattactggccaacatgggagctgaggtttgatccaggaactgctatgtggcgacgcaaaacaatcaaagctttggactctggtgttttgtgaacttacttggctgattaggttttcctgtggggagtgcaaaattggggaacgtgtagaaaga

SEQ ID NO: 1976 - DNA, 354 bp, Nicotiana tabacum
cggcttgctaatatcggagtatcaagtaagaaaacgcttgtcccacagcagtggtgcaatcccgcagtgatctcgacaaaggtatagcagtctacttcaaacctaaagagcccaaacatcagcagattgtggagtcttcttcgttaaacatcaatttctattttgatagtaataagtgtgctaacctaacagtgtggaaggtagacaactaccctatacctcgaaagtacagcacaataagcacaggtgcaaagttgggaaatcccctggatgtgaatagctggtttcaaattaagcctcttggtggctcgacgtataagctagtgttctgtccctacggagaggagtttacta

SEQ ID NO: 1977 - DNA, 315 bp, Nicotiana tabacum
  misc_feature (81)..(81): n = a, t, c, or g
cgggtacgaacagtccacctgaatgggaagcctcgagtacttacattgaagcaggatttacattactggccaacatgggangctgaggtttgatccaggaactgctatgtggcgacgcaaaacaatcaaagctttggactctggtgttttgtgaacttacttggctgattaggttttcctgtggggagtgcaaaattggggaacgtgtagaaagttcaccggctgcgttggtagttactctaacttattggagttgaaagtcgccatacatcaatatatgcaaaatcatataaagcaggtatctggctttatata

SEQ ID NO: 1978 - DNA, 295 bp, Nicotiana tabacum
taataattcgtatatttaaccaaaaggtggagaaatcacaagcaccactctttgatgcaagtaaaagccccaccttttttcttcaattaataaaggggacacaacaaacgtggagtaggcacagccacgatgtcgattagctcttggagcagtgagtccaaaaatatcatccattttaagctcacttggtttcataccatctggcaattcccaagtaaaacaatgaagaagatgggccacagccatttccaatgcataaagcccaagttgcatacccgggcacccccgccgccca

SEQ ID NO: 1979 - DNA, 267 bp, Nicotiana tabacum; identical to SEQ ID NO: 877

SEQ ID NO: 1980 - DNA, 178 bp, Nicotiana tabacum
cggcttgctaatatcggagatcaagaagaaaacgcttgtcccacagcagtggtgcaatcccgcagtgatctcgacaaaggtatagcagtctacttcaaacctaaagagcccaaacatcagcagattgtggagtcttcttcgttaaacatcaatttctattttgatagtaataagtgta

SEQ ID NO: 1981 - DNA, 551 bp, Nicotiana tabacum
cggcttgctaatatcggagatcaagaagaaaacgcttgtcccacagcagtggtgcaatcccgcagtgatctcgacaaaggtatagcagtctacttcaaacctaaagagcccaaacatcagcagattgtggagtcttcttcgttaaacatcaatttctattttgatagtaataagtgtgctaacctaacagtgtggaaggtagacaactaccctatacctcgaaagtacagcacaataagcacaggtgcaaagttgggaaatcccctggatgtgaatagctggtttcaaattaagcctcttggtggctcgacgtataagctagtgttctgtccctacggagaggagtttacttgccaaaatgtaggcatcactgaggaaaatggatataggcgtttggttctcacagagaatgcaaaggcctttgtgttcataaagcatggcggattaggaaaggccgaagcatgattatgcatctgctttctaataaaactaagttgtgtaaaacatgtattaatgcaggccctgcattcggtgtttcactggatgtaaga

SEQ ID NO: 1982 - DNA, 575 bp, Nicotiana tabacum
cgggtacgtaacagtccacctgaatgggaagcctcgagtacttacattgaagcaggatttacattactggccaacatgggagctgaggtttgatccaggaactgctatgtggcgacgcaaaacaatcaaagctttggactctggtgttttgtgaacttactcggctgattaggttttcctgggggagtgcaaaattggggaacgtgtagaaagttcaccggctgcgttggtagttactctaacttattggagttgaaagtcgccatacatcaatatatgcaaaatcatataaagcaggtatctggctttatatactatttgttgtaaatgaccgtttatcggatgaaattaataggtggtagaattttagacaagttataagtgctagcgctataaatcactagtgaattcgcggccgcctgcaggtcgaccatatgggagagctcccaacgcgttggatgcatagcttgagtattctatagtgtcacctaaatagcttggcgtaatcatggtcatagctgtttcctgtgtgaaattgttatccgctcacaattccacacaacatacgagccgga

SEQ ID NO: 1983 - DNA, 254 bp, Nicotiana tabacum
cgggtacgaacagtccacctgaatgggaagcctcgagtacttacattgaagcaggatttacattactggccaacatgggagctgaggtttgatccaggaactgctatgtggcgacgcaaaacaatcaaagctttggactctggtgttttgtgaacttactcggctgattaggttttcctgggggagtgcaaaattggggaacgtgtagaaagttcaccggctgcgttggtagttactctaacttattggagtta

SEQ ID NO: 1984 - DNA, 368 bp, Nicotiana tabacum
  misc_feature (294)..(294): n is a, c, g, or t
cggggtacttaacagtgtaagtagcagtagacagtgaaggagattgtgacttcctggttagtaacaattccagcgggtgctacctttgctgttggctacacatggatattcactaagctcttatcatatatactctgagtgtaaattaacggataacgccaccactcaaacttcttggattaattataaaatcacacagataaccttttttgtcgtgatttgagaaatgcaatttttgaaccttgtggaggatccatgataaagagtagtagtccattcagtttagaagacganacaagctttgttttctgcctagcactttgcctccctatataagctgctaacttttgtgttggatttaagcaaaa

SEQ ID NO: 1985 - DNA, 232 bp, Nicotiana tabacum
gttttacatatccactggcacacgtccatacaagtgtgcaggcaatcttggagtaggaatagcttgtattggatttttcatgtaagttactgttccagggctctcctccaagtcaatattctccgggttaacccccgggggcggagcccacgtaaaatgatgcaacaaatgacccaacatagatgtgaccaagttgatagcaagttgtgcacccggacacccccgcctccca

SEQ ID NO: 1986 - DNA, 189 bp, Nicotiana tabacum
cggggaaaatattgtacacacaatgaagggaacatctggggataaatttgagttcaaggcccctcggagtgggatgtacaagttctgttttaagaatccttattcaacaccagaaactgtctctttctacatacatattggacacatccccaatgagcatgaccttgctaaagatgaacatttggacca

SEQ ID NO: 1987 - DNA, 644 bp, Nicotiana tabacum
gttacattacaagtaaacagaaatgtcagtagtcctagccgccttgaacagccttggccaagccaaaagcagcagcagatgcaactgctccaatgagtgcagtttgaaaagcgctcctaaacggcttgtttccagtaaagtgacctttggcgtatccaaagattagtaaggccagcaaagttaccaacacagaagcgacaacagcctttcttgcgattggaatgaacatgtatgggatcagagggactagtcctcccaagatgtaagcaacggcaatggtaaacgcactctgcagcgctcttcttggatctggcttctctaaaccaagttcaaacttcatcataaagtcaagccatgccggtgggttcttcctcaaagcattcacaactggtccatattcatggggctgaatcccatattgtaacaaaatttctgcaatctccgctgcttctgtatctggtacagaaatgatctcttcttcctccctcttaagctctctcatatagtgatcagcctcactcttggcagccaagtaacctccaagtcccatggagatggcaccagcagcaacctcagcaataccagcagtaagaataatagaggaagacgcatttgcccctgatagccccgccgccaatgcaaac

SEQ ID NO: 1988 - DNA, 252 bp, Nicotiana tabacum
cggcccttccctggtaccctgcgcatagcaggagcttagtgcaccgggttgccctttatggagggttcatgcatatgatgttacattaagtgcaatttatgagctagtattattaaggcatatgttaacagaagttcttgaatattgtgagttgtgccatgtaatgaagagatcaatgtgtctactaacaaaataatttaaaagcgagtacgataatattggtaagataaaagaggtatatgttctcttgta

SEQ ID NO: 1989 - DNA, 128 bp, Nicotiana tabacum
cggggacttaacagtgtaagtagcagtagacagtgaaagagattgtgacttcctggttagtaacaattccagctggtgctacctttgcagttatctacacatggatattcactaagctcttatcataa

SEQ ID NO: 1990 - DNA, 422 bp, Nicotiana tabacum
cgggacataatcatcggagtctccgatggactaacggtgccgtttgcattggcggcggggctatcaggggcaaatgcgtcttcctctattattcttactgctggtattgctgaggttgctgctggtgccatctccatgggacttggaggttacttggctgccaagagtgaggctgatcactatataagatgagcttaagagggaggaagaagagatcatttctgtaccagatacagaagcagcggagattgcagaaattttgtcacaatatgggattcagccccatgaatatggaccagttgtgaatgctttgaggaagaacccaccggcatggcttgactttatgatgaagtgtgaacttggtttagatgaagccagatccaagatagatgcggctgcagagtgcgtttaccattgccgtt

SEQ ID NO: 1991 - DNA, 429 bp, Nicotiana tabacum
cggggcccacaccatcggaatcagccactgcacttccttcaccgaccgtctcttccctaaccaagacccaaccatggacaaaacatccgccaacaaccttaaacgcagctgccccacagctgattctaacaacactgtcaacatggacattcgaagccctaatgttttcgacaacaagtactacgttgatctcatgaataggcaagggctttttacatctgatcaagatttgttcactgatagaaggactaggggaattgtggagagctttgctaagaaccagtcgctgttttttgacaagtttgtgattggtatgatcaagatgggacaattgaacgtgttgactggtggatgatggtgagattaggacaaagtgtgataggatggatacaagatataagatagcttgatcattgctactgttgttga

SEQ ID NO: 1992 - DNA, 568 bp, Nicotiana tabacum
cggggcccacaccatcggaatcagccactgcacttccttcaccgaccgtctcttccctaaccaagacccaaccatggacaaaacattcgccaacaaccttaaacgcagctgccccacagctgcattctaacaacactgtcaacatggacattcgaagccctaatgttttcgacaacaagtactacgttgatctcatgaataggcaagggctttttacatctgatcaagatttgttcactgatagaaggactaggggaattgtggagagctttgctaagaaccagttgctgttttttgacaagtttgtgattggtatgatcaagatgggacaattgaacgtgttgactggtggagatggtgagattaggacaaagtgtgataggaggaacaagaataagatagcttgacattgctactgttgttgaagagttggaggataactttctctgctttgttttaagtagtcttttgtttttgtttcaaaaatgctttttattgcttttttgtgataatgacgagtgtcttagctagcataaatgcataataataaacctttgttttgtgatga

SEQ ID NO: 1993 - DNA, 286 bp, Nicotiana tabacum
cgggacagtcgggagcaatgtgtggctgaggtcaagctgagcgggagtgtagacaccggcaatcgggttgatgaacgcgaggtagcggcaggtttaccgacagcagaaggagtggtacaaggtctgagcaatgacgggaccttgcgaggcgtgaccagcagcactcgcgcgcgaacgccgacgccaagggtggtgcagagttggcgagtcggtcagggacaaagtcgaaacacgtctgataagaagtagaaattgtaggctgcaaaacgtttgtttccattcaaaa

SEQ ID NO: 1994 - DNA, 184 bp, Nicotiana tabacum
cgggtgtggaccgctgacattatacccgaggagctcatgccatttactgaggaatgaagctatactcgtaagtggtgcatctcgtgctttatcagttctgtcaatggcgaaagccggtttcgtaattgtgccttcttctcttcctctacagcggtttcatggtgccgggcaccccctccgccca

SEQ ID NO: 1995 - DNA, 521 bp, Nicotiana tabacum
caaaaaagcaataaaaagcatttttgaaacaaaaacaaaagactaacttaaaacaaagcagagaaagtttcctccaactcttcaacaacagtagcaatgtcaagcttcttattcttgttcctcctatcacactttgtcctaatctcaccatctccaccagtcaacacgttcaattgtcccatcttgatcataccaatcacaaacttgtcaaaaaacagcgactggttcttagcaaagctctccacaattcccctagtccttctatcagtgaacaaatcttgatcagatgtaaaaagcccttgcctattcatgagatcaacgtagtacttgttgtcgaaaacattagggcttcgaatgtccatgttgacagtgttgttagaatcagctgtggggcagctgcgtttaaggttgttggcgaatgttttgtccatggttgggtcttggttagggaagagacggtcggtgaaggaagtgcagtggctgattccgatggtgtgggccccggacacccccgccgccca

SEQ ID NO: 1996 - DNA, 168 bp, Nicotiana tabacum
cagcaagcacagagacacagaatggcgggtttcaatatcattttgcaatccatcatgataaacctgccttgcagcaaaaagatctacggccaacaagtgaatccatgcagaagctaatgtcatctcgttggagaacatcttagttatgccgggcacccccgccgccca

SEQ ID NO: 1997 - DNA, 166 bp, Nicotiana tabacum
cgggtatgcaacttgggctttatgcattggaaatggctgtggcccatcttcttcattgttttacttgggaattgccagatggtatgaaaccaagtgagcttaaaatggatgatatttttggactcactgctccaagagctaatcgactcgtggctgtgcctactca

SEQ ID NO: 1998 - DNA, 283 bp, Nicotiana tabacum
gtaattcacagtttccatatttaggttgttgatgaacaatgtacgcggccccaccgaaataacacgaacccatcgcacgccctttcttctgataataactattgaaagcatatgatgcatgagcttccagcgtgttaggattgtaacacgtggaccctggctgaatcgaacggcaatcagctccgccctcaccacaagcgaaatctagagctgcttgtagattatccttccccgcttcaccactcgccacgcaccacgtttgcccggacacccccgccgccca

SEQ ID NO: 1999 - DNA, 500 bp, Nicotiana tabacum
cggcagccaaagtcttttatgcagggtcctcagccctttcatcaactgcaaatgctatcacctcaacaccagcagcaacttatcccagcacagcagaacttgacctcaccatctgctagtgacgtcgaaagcagaaggctacgaatgctccttagtaatcggaactctagtatgggcaaagatggcctttcaaattctgttggtgatgttgttccaaatatgagttcagcttcacagggtcctggtcctccacaagatattttgctcaagttgaggatggcccaattccaacagcaacagcagcagcagcagcagcagcagcaacagcatactggtaatccacaactgtcgcaacagcagcagcttcctcaacacacactttctggtccgcaaccacagagttcaaatcacagtctgcaacaagataaaattattggccctggcagtgtgcagaatggaagcatgtcaaatcttttcggggaaatgatcaggcttcaaaa

SEQ ID NO: 2000 - DNA, 201 bp, Nicotiana tabacum
gtggcggacgcggtggaggatactgccgctatggttgttgcggccgcccggaattattatggttgcagcaggtgctgctcctacaaaggtgaggccatccatggataaggtcacctgaagctttgtactcgcaagatgtaatagtaataatcttgcagctttagagcttgttgttaacaagttatgaataaaattaagtca

SEQ ID NO: 2001 - DNA, 257 bp, Nicotiana tabacum
gtctgggaatgctttggagtgcgagtatagtgcgcgtcagctacctaacttgtatttatagattccaagtatatgctgggtctgtgttcagagtagcatgaacaggcctttcctgtttgttgaatttacctcatatgtttattgcagcaggaacttgagttgagacattagagattgctggtatatatttttaagagcttgctcgttttgtacatgtttcttttagagtaggaccttaccgttgatttcccttcaaa

SEQ ID NO: 2002 - DNA, 321 bp, Nicotiana tabacum
gctgcgcaaaacgttagggcaacatatcatatatataacccgcagaatgttgggtgggatttgtatgcagttagtgcgtactgctcaacttgggatggtaacaagcctttggcatggaggaggaagtatggttggactgcattttgtggccctgttggacctcgtggccgagactcttgtggcaaatgcttaagggtgacaaatacaggcacaggagctcagaccacagtgagaatcgtggatcaatgcagcaatggcggactagacttggacgttaacgttttccggcagctcgacacagacggaagagggaatcaacga

SEQ ID NO: 2003 - DNA, 269 bp, Nicotiana tabacum
tttgaagggaaatcaacggtaaggtcctactctaaaagaaacatgtacaaaacgagcaagctcttaaaaatatataccagcaatctctaatgtctcaactcaagttcctgctgcaataaacatatgaggtaaattcaacaaacaggaaaggcctgttcatgctactctgaacacagacccagcatatacttggaatctataaatacaagttaggtagctgacgcgcactatactcgcactccaaagcattcccagacacccccgccccc

SEQ ID NO: 2004 - DNA, 245 bp, Nicotiana tabacum
tcggagaagtatagtcaaattactgtgaaaaaacatatactactaatatttctcataccaaacataaacaatacatgcaaaattagttctctaaaaatccaataaagaagtttatgcccaattgaaccaagtgctttcgactgctgcaagtcaattccagcatgtgattatcaaaattgcataaaaactagctacaataaagataagatcaatctaagagaagcttgagctacggggtgcacccc

SEQ ID NO: 2005 - DNA, 305 bp, Nicotiana tabacum
cgggtacgctctgctctctcgcgacccctactctaatcaaaagactaaaggcccctactgaagataggtcgccaaactacgaccgagagtttcgccttttgaagcgccagtcgcgtagggcgaccgggccaggccgagtcggataaggctttgatgactcaaggttcatattggggaaaggagagtgaggggaagagggggcagccctcggcccgatcatccaattgcgctccaacagacaggcatggttctgtagatcaaagcaacttcgtcactattcgtgtacctcggccgcgaccacgcta

SEQ ID NO: 2006 - DNA, 330 bp, Nicotiana tabacum
gtgtcatgggatccaaatcacaagccagaaccaaggcgaaagagagggttctcgccaaggaagcagcacagagaatgaactagagcttctatttatgttgctgtttgggttagacctacaaattttgtgtttttgattcgcatgcttgagcgatgttagagatcctacgtggattagacttatattttctttgtttacatatttatgtttctatgcaaaagacttgtctaatttttcggttttcggaatagatggttggttgagttggttatgtacgatggataaaatgggaaggctcttccattcactaggtgcttattcttctgataa

SEQ ID NO: 2007 - DNA, 295 bp, Nicotiana tabacum
gtgctgcagttgctgttgctgctcccgctggtggtggtgctggtgctgcagcagctgcccctgctgcagaggaaaagaaggaagagcccaaggaagaaagtgatgacgacatggggttcagtctgtttgactaggagctcctttcagtatgatatttggttcctttttagagaattgatgaaacttggtaatagcaccctttataaggagatttttgatctgtttgtcacaattaaatgtaatcttgaggttatgatttatgaacatctgtcatgtcagtaattgctacttaaaa

SEQ ID NO: 2008 - DNA, 477 bp, Nicotiana tabacum
gtgctgcgcaaaacgttagggcaacatatcatatatataacccgcagaatgttgggtgggatttgtatgcagttagtgcgtactgctcaacttgggatggtaacaagcctttggcatggaggaggaagtatggttggactgcattttgtggccctgttggacctcgtggccgagactcttgtggcaaatgcttaagggtgacaaatacaggcacaggagctcagaccacagtgagaatcgtggatcaatgcagcaatggcggactagacttggacgttatacgttttccggcagctcgacacagacggaagagggaatcaacgtggccaccttattgtgaactacgagtttgttaattgtggtgacaatatgaatgttctggtatccccagttgacaaggaataagaagctatatatggccatgtttagtctttgacggcccaaataaaagtaaaaagaacgatatgtaaaatggat

SEQ ID NO: 2009 - DNA, 440 bp, Nicotiana tabacum
  misc_feature (358)..(358): n = a, t, c, or g
gtgctgcgacaaaacgttagggcaacatatcatatatataacccgcagaatgttgggtgggatttgtatgcagttagtgcgtactgctcaacttgggatggtaacaagcctttggcatggaggaggaagtatggttggactgcattttgtggccctgttggacctcgtggccgagactcttgtggcaaatgcttaagggtgacaaatacaggcacaggagctcagaccacagtgagaatcgtggatcaatgcagacaatggcggactagacttggacgtaacgttttccggcagctccgacacagacggaggagggaatcaacgtggccaccttattgtgaactacgagtttgttaantggtggtgacaatatgaatgttctggtatccccagttgacaaggaataaagaagcctatatatggccatgtaagtctttgat

SEQ ID NO: 2010 - DNA, 376 bp, Nicotiana tabacum
tcatattgtcaccacaattaacaaactcgtagttcacaataaggtggccacgtcgattccctcttccgtctgtgtcgagctgccggaaaacgttaacgtccaagtctagtccgccattgctgcattgatccacgattctcactgtggtctgagctcctgtgcctgtatttgtcacccttaagcatttgccacaagagtctcggccacgatggtccaacagggccacaaaatgcagtccaaccatacttcctcctccatgccaaaggcttgttaccatcccaagttgagcagtacgcactaactgcatacaaatcccacccaacattctgcgggttatatatatgatatgttgccctaacgttttgcgcagcacccc

SEQ ID NO: 2011 - DNA, 350 bp, Nicotiana tabacum
gtgctgcgcaaaacgttagggcaacatatcatatatataacccgcagaatgttgggtgggatttgtatgcagttagtgcgtactgctcaacttgggatggtaacaagcctttggcatggaggaggaagtatggttggactgcattttgtggccctgttggacctcgtggccgagactcttgtggcaaatgcttaagggtgacaaatacaggcacaggatgctcagaccacagtgagaatcgtggatcaatgcagcaatggcggactagacttggatcgttatatcgttttccggcagctcgacacagacggaagagggaatcaacgtggccaccttattgtgaactacga

SEQ ID NO: 2012 - DNA, 292 bp, Nicotiana tabacum
gtagcaattactgacatgacagatgttcataaatcataacctcaagattacatttaattgtgacaaacagatcaaaaatctccttataaagggtgctattaccaagtttcatcaattctctaaaaaggaaccaaatatcatactgaaaggagctcctagtcaaacagactgaaccccatgtcgtcatcactttcttccttgggctcttccttcttttcctctgcagcaggggcagctgctgcagcaccagcaccaccaccagcgggagcagcaacagcaactgcagcacccc

SEQ ID NO: 2013 - DNA, 172 bp, Nicotiana tabacum
gccttgtataatgatggttgatagtggtggtagtggttggttatagtggctggtagtggtagtactggtggttggtagtggtaatagtgattgttgtgcaatgatggctggtggtgattgtggacagaatggtggtgaaagttgatttcggaaaatctttaattcaatagta

SEQ ID NO: 2014 - DNA, 511 bp, Nicotiana tabacum
gtatccttatggagtacatgaacgtcggcacactagaaagtcttttaaaatcacaagcaactttctccgaacttagcttagcaaaaatcgctaagcaagtacttagcggactcgactacttacacaatcacaaaatcattcacagagatttaaaaccttcggaccttctagtaaatcgcgagatggaagtaaaaatcgccgatttcggagtgagtaaaatcatgtgcaggactttagatccttgcaattcatacgttggaacttgtgcttatatgagcccagaaaggtttgatccagacacttatggagttaactacaacggttacgcagctgatatttggagtttgggcttgactttaatggaactatatatgggccactttccgttcttgccacctggacagagatcggactgggctacgctaatgtgcgccatatgcttcggtgagccgcccagtttgcctgaagggacgtcgggaaatttcagagatttatcgagtgttgtttacaa

SEQ ID NO: 2015 - DNA, 425 bp, Nicotiana tabacum; identical to SEQ ID NO: 1959

SEQ ID NO: 2016 - DNA, 442 bp, Nicotiana tabacum
cggactcttccgattacctcccataattgcttccctgcccttgaaattgtataatttaatgtgacatccgttggttttccagtgttcaggagtgaactacttacaacaaaactggatatggttttgagaaagggataatgtcactgcaagggtatttaatgtttcagatctgtggttggaattggaaactaatgttgctgcagctggtatgaacctccatagatttgtttcaagataatgaatgtgctaacgtagagatcaatgtttgacctgtttttctttcttattttctgttttgcccattcctggattgcgtgcttgggtttgcttgctttttgtttctttttccattcaacgtttttgtcctaccattccatgtattgtggacacggttagaaacccaaaacaatattttataatactaaacgaagatacttcgaga

SEQ ID NO: 2017 - DNA, 283 bp, Nicotiana tabacum
gtagagtgtttggattggcttttaacatggtcaaatcagcttttaagctctttctagcttttttcagtgtttgacaaagttaaaaaatacttaaaataagttaaaaactgcttaaaagttaaaacaagccaaaccagtaagctagcaaccccaacttattgctttttggcataaaagttatttatgcctaaagactacttttttagctatcattcgcgccttgtaacattaatttgtagagtgcaaagcctcctctgtggcagccgggcatatccgccgccca

SEQ ID NO: 2018 - DNA, 562 bp, Nicotiana tabacum
  misc_feature (19)..(19): n = a, t, c, or g
cgcgagcgtacagctacantggggtcgggtggggttgcttttcttcaccctgaaagcaacagtgacgaaaaagcttatatgtgcctatataggataacgcttgagcaatttaatgatgtttacttcaagagaatgtttcgaactttgacatgaactcccctttatttgacatgactgacttacaatctattgaaaacagcaaatgtgtttcagcagaggctgtcaagatgccgactctcagatattgataacttcaaatcaggtaacgtacttacgtgcaaaccatctaaagaatatgccaataatctgattagagggttggtagaaggaaagcagctctcggaagaggaagccaccacttacatacaagaagcagctagcagagcattgtgagttgtgactacgttttccttcttgtttctttagctgctagataattatgtgactatgcctcacaacatatgctccggaactgttattgtaccattattttttgatgaagcaactgctatcatttttttcagtccaggtgtatataacttataacatctgacatagatgt

SEQ ID NO: 2019 - DNA, 374 bp, Nicotiana tabacum
cgcatcctttaccccaaactcaccggaaaaacttgccaacccggcgagttaactcatggtccccctttcccttctctctttcttccacgtggcctgacaaataaccgattttggttcgaatctacgttgtattttgctctctcatacgtgaatctctttcaacgatagatgatggacgaagggtaggatatgattaatgaaaattaatcatacccctccatttgtccagatttttaccaaaaagaaggaaattttcagaattttggtgggattttcggatttttgaagggtttttgctatttcttgcaaaggaaggagagaagcttcgagagagggctatatatttgggtctggacagagattgaaagggggta

SEQ ID NO: 2020 - DNA, 381 bp, Nicotiana tabacum
gtcacgtatctatagaaacatataccaaagcagaagctcaaaactaaagctctaactaataattctacgttcaacatgtaagcaagaccttgcattactaaccccaacattacatctattcccttaatatcatatgctacgcgcaagaagtgcacataggcacagaaatatccggtgcagcctagcagtagagcaggatacccataattgaaatccaaaaggtgacgcaaggctgctgcagttaccagaggaatgacctcgatcataaatttagccttggcaccaattaactggaaaggcatgtcgcgatgccaataaacaacagagtacagcacattgatatgaagtaaaaagcaacaacccgggcaaatccgccgccca

SEQ ID NO: 2021 - DNA, 354 bp, Nicotiana tabacum
aaagaatgaattaaatagcttttatttactaacaattacacaattagtgatccccttctcctagtaagcttctaatccatacaagactccagcgtgtttttctggcccgtcttttacgaaataaatatccctcattttctgaaatgcatgccacgtcaacaagctatctgaaccggcctggtggcatttaccgaccgctctgtccacagccaatgtactcgcaactcggtctaacccaccaaagaggctattacagaacctcatcatatgcttcacatcataaactttgtttccaaaaaacgccctaagaatttccaaaaagtcctctaaaccaccgggcaaatccgccgccca

SEQ ID NO: 2022 - DNA, 393 bp, Nicotiana tabacum
cggtgtttcaattgccatcatgggttgcattgtgaatggacctggggaggtggctgatgctgacttcggatatgttggtggtgctcctgggaagattgacctttacgtcggcaagacggtggttaaacgcggtattcaaatggagcatgcaacagatgccttgatccagctaattaaagataacggccgctgggtggatcctcctgctgaggagtaagatcaactggaagagttaacagataacaattgcattgtaaatgcagattctagcacctgataataatacagcatcagcaaactccagaaagctgccatttccaaccagctgagatgtagctttttatgttgtttgtagaatctagtacatgcatgcaaatgcagaatattcatgta

SEQ ID NO: 2023 - DNA, 234 bp, Nicotiana tabacum
  misc_feature (107)..(107): n = a, t, c, or g
cgtccggaatcctcttcagagagaactacaactgcccggcaagagagccgtacaccccacgctactacatcaactagactcgttccttagcggatattcgatgtttnaagaagaaccaggcgacaacgaaatgggagaaacatagaaattgagattaatcgcaaactatgaaaatatgcttgaaaaaagtaaaaagaaagaaactcgaaataaaaaaaggttcaaacagcaaaa

SEQ ID NO: 2024 - DNA, 365 bp, Nicotiana tabacum
cacctaattctaatagcttttgctcatataagttcacatctgttataaatatttaattaagaaaaatcttgagtccgccctctgtatgctaagccttttggaataaaatcttgaaaaccggacgattgacagccaaacgcctcgatccattattcgctggtgcaataccaatatacccacacaacaatcttggacaaataaaagaacaccctgtagctcttggacaatactgtaacgcataggcatcttcatacttctgaatagtaaacaaacttgtggccgtgccattttcagacccacccttaattccgccagtggtcacaaacccatcttcaattttccaaacagtggttttattgcaaata

SEQ ID NO: 2025 - DNA, 402 bp, Nicotiana tabacum
attaagaaaaatcttgagtccgccctctgtatgctaagccttttggaataaaatcttgaaaaccggacgattgacagccaaacgcctcgatccgttattcgctggtgcaataccaatatacccacacaacaatcttggacaaataaaagaacaccctgtagctcttggacaatactgtaacgcataggcatcttcatacttctgaatagtaaacaaacttgtggccgtgccattttcagacccacccttaattccgccagtggtcacaaacccatcttcaattttccaaacagtggttttattgcaaatagacacgtatcttggtgctgcaaatttgatatttatgtcttcattttcgtcaattactagccctgaacttgaattcaccattaagaattttaa

SEQ ID NO: 2026 - DNA, 313 bp, Nicotiana tabacum
aaattcttagggcgttttttggaaacaaagtttatgatgtgaagcatatgatgaggttctgtaatagcctctttggtgggttagaccgagttgcgagtacattggctgtggacagagcggtcggtaaatgccaccaggccggttcagatagcttgttgacgtggcatgcatttcagaaaatgagggatatttatttcgtaaaagacgggccagaaaaacacgctggagtcttgtatggattagaagcttactaggagaaggggatcactaattgtgtaattgttagtaaataaaagctatttaattcattctt

SEQ ID NO: 2027 - DNA, 341 bp, Nicotiana tabacum
tttagaggactttttggaaattcttagggcgttttttggaaacaagtttatgatgtgaagcatatgatgaggttctgtaatagcctctttggtgggttagaccgagttgcgagtacattggctgtggacagagcggtcggtaaatgccaccaggccggttcagatagcttgttgacgtggcatgcatttcagaaaatgagggatatttatttcgtaaaagacgggccagaaaaacacgctggagtcttgtatggattagaagcttactaggagaaggggatcactaattgtgtaattgttagtaaataaaagctatttaattcattctttttaattgaaaa

SEQ ID NO: 2028 - DNA, 325 bp, Nicotiana tabacum
ttttggaccagaaacagtcagaactatgtcaacataaatgatttaaaaagttgcagcaggacaaaaggaagggaaaaaacaatgatccagaacatgcgagggagtacttgtacaccagcagcagttaataaaattctacagcctcaaacatgtcagtaggggcatactcttgtttcaactgaccattggatcaggacttgatgcagacacaacatccagcagtgagttcacaggctctaattcttcatgccaaagttggagggaatcacctggatagaactttcttgtggctccatctttgttaatagttacagtccgggcagct

SEQ ID NO: 2029 - DNA, 330 bp, Nicotiana tabacum
ccatggcggccgcgggaatgcgattgggaggcgggcgtgttccggggcgtaagtcccgactgccgaggtgtaagtctcacggaactaagccccacacataagtcccggggcgttttacgagtgctccgctccagggcgagccccgggcgagtcccaattctgccttttaaaacagagctaattactatagtacaaagtaattttattctgtgcagtggagcatgaagtactcgaaagagaaagaggaagactacgagcattatatcagcaacagcaactgccacagtcacagcagcaacagcagtcatcttccagccatcggcgcagcac

SEQ ID NO: 2030 - DNA, 322 bp, Nicotiana tabacum
tcttaatggagggatcagataaagaaggtttcgatataacaggaagtagagagatcaagatgatgccatttggcgctggtaggagaatatgcccaggctatgctttggctatgcttcatttagagtactttgtggctaatttggtttggcattttcgatgggaggctgtggagggagatgatgttgatctttcagaaaagctagaattcaccgttgtgatgaagaatccacttcgagctcgtatctgccccagagttaactctatttgaatttggtaattactagttctttctatttgcgttgttccctgttgatggactta

SEQ ID NO: 2031 - DNA, 256 bp, Nicotiana tabacum
ggtttggcaacgaaatgggcggacaagctggtgctcagcatgtgcagccaatgccagttgaaaatccaagtaaaagagtttactgttctgtggtggagtgaagcccaggggttggtagctattgtgcttcaagcaatcaatgagtatagtcattactgttgccgatggcaatgacgtatcaggaaatagacacacaataaacgagaacagaatggggaaaggaattatactggcatttaagctggcagcttgattt

SEQ ID NO: 2032 - DNA, 599 bp, Nicotiana tabacum
caatacgcaaaccgcctctccccgcgcgttggccgattcattatgcagctggcacgacaggtttcccgactggaaagcgggcagtgagcgcaacgcaattaatgtgagttagctcactcattaggcaccccaggctttacactttatgcttccggctcgtatgttgtgtggaattgtgagcggataacaatttcacacaggaaacagctatgaccatgattacgccaagctatttaggtgacactatagaatactcaagctatgcatccaacgcgttgggagctctcccatatggtcgacctgcaggcggccgcgaattcactagtgattttcaagccggagaggtttgcaaaaatggccatagagttgttgggctattcgcaaataaatgagcaattagctctacaagaagcagcttcagccggtttaaattccatggatcatttaatccggttcgtttcacatcaacagcagaaaaaccaaccagttcagcccgattgtagacaactcgccgacttcgctgtttcgaattttaagaaggttatttctatcttgaaccggactggtcatgcccggtttagacgcagtccggttcaatc

SEQ ID NO: 2033 - DNA, 323 bp, Nicotiana tabacum
taaaaggaaaagaaaatacttatccctgacaaaacaaaattcatatcccaacaaaatcaagctgccagcttaaatgccagtataattcctttccccattctgttctcgtttattgtgtgtctatctcctgatacgtcattgccatcggcaacagtaatgactatactcattgattgcttgaagcacaatagctaccaacccctgggcttcactccaccacagaacagtaaactcttttacttggattttcaactggcattggctgcacatgctgagcaccagcttgtccgcccatttcgttgccaaaccgctccggcttgaaa

SEQ ID NO: 2034 - DNA, 325 bp, Nicotiana tabacum
tctactaggaaataaagtgaaatgtgcagatggcaaggcttgtacacggaattgcgatccagatgtagcttacatggtttgcccatctactcgacaaaagattactaaaccatgtgtcaactgttgctcagcaaaaaaaggttgcaagcttttccgcagcaatggatctgtaaaatgtactggaacttagcttttgtccattattaataagctagctacaaggccactacttaggatatctgtgcaataaggcttgacaatatataagttctcacgtgtgatttgtactatatattgagtatggtatttcattccttgttcaata

SEQ ID NO: 2035 - DNA, 327 bp, Nicotiana tabacum
ttggcaacgaaatgggcggacaagctggtgctcagcatgtgcagccaatgccagttgaaaatccaagtaaaagagtttactgttctgtggtggagtgaagcccaggggttggtagctattgtgcttcaagcaatcaatgagtatagtcattactgttgccgatggcaatgacgtatcaggaaatagacacacaataaacgagaacagaatggggaaaggaattatactggcatttaagctggcagcttgattttgttgggatatgaattttgttttgtcagggataagtattttcttttccttttatgttatgttgttcctccaaaa

SEQ ID NO: 2036 - DNA, 570 bp, Nicotiana tabacum
tccgcactataacaagtagttactatcggggagcacatgggattattattgtttatgatgtaacggaaatggagagcttcaacaatgtcaagcaatggttgaatgaaattgacagatacgcaaatgagagtgtttgcaagcttctggtgggaaacaaatgtgatttggtagaaaacaaggttgtggacacacagacgggaaaggctctggcagatgagctaggtatccctttccttgagacgagtgcaaaagactccattaacgtggagcaggctttcttaacgatggcgggagagatcaagaaaaaaatgggtaatcaaccagctggagccaagaagacaggtagtactgttcaaatcaaaggacaaccaattgagcagaagagcaactgctgtggctaactgctgacgctgtgcttctgtatcccctctaatcactagtgaatccgcggccgcctgcaggtcgaccatatgggagagctcccaacgcgttggatgcatagcttgagtattctatagtgtcacctaaatagctgggcgtaatcatggtcatagctgtttcctgtgtgaa

SEQ ID NO: 2037 - DNA, 566 bp, Nicotiana tabacum
acttagattataattttagacatagtaggagcttcgagaaagtaaatagattgtgaagaaacattaacgtcatggaaaagattaattcctcctccctcatcatcctatcttcgttactgccaatttcttaagaaccacaacaagctgatttttgggcagtttgagcacctcctgctccctggtcgggttgattaatcctgatggtctgaggctcggctctattgtcagattcagcaagtctttgttttatatcccgagctattgaaaagaaaacctcctcaacattcatattcgtcttggcactcgtctcaaagaatttaatgccatattcatcggctagcgcttgacccttggatgtaggaacagcccgtttgctttcatccatatctgccttgtttcccacgagtattttattgacattgtcagaagcatgttgttcaatgtttcgtatccaattcctgatgttgttaaacgatgactcgtcagtcacatcatataccagcaagatacccatggctccacggtagtaagctgttgtaattgttcggaaccgctccggctcgaaa

SEQ ID NO: 2038 - DNA, 564 bp, Nicotiana tabacum
  misc_feature (546)..(546): n = a, t, c, or g
agctgaaattttattattagtttcaacaactattacattcagcttgaaaaggcccttagtaaggtaacctttttcctacaaacatttcattcttactaatcactaccttgtcagatacaaaaacgcacttgaaaccatgctttacaagaagtccagtaaagactaagttcttcctaatctcgggaacatgaaggacgttgttcaaagtcatgaccttgccagaagtcatcttgagaaatatcttaccgtatccttcaatgtttgttgtagcagcatttcccatagagagcttctcttcgggtccagcagaagcatatatagaaaatacttccctcacggcacaaacatggtgagtggctccagaatcaatccaccactcctttgggtttcctaccaggttgcattcagaaagcatggcgcacaagtcatcaacatcatcatgcttttctaccatgtttgcttgacccatttgcttgtctttcttccgagcacaacacttcgtagatttgtgtccggttttcccacagttgtagcagtttccactgnaaccgctccggctcgaaa

SEQ ID NO: 2039 - DNA, 258 bp, Nicotiana tabacum
ttcgagatgctgctagggaggctgctcttcgtgaaatcaaggaaagaatcaagaagacaaaggatgaaaagaaggctaagaaagcagaggtgatggcaaagtcacagaaaggtggagggaagggtaatgtgtcaaagggagctgcaggaaaaggccctaagcttggcggcggcggtggaaaacgctaagccattgtttatgtttgtttttctaagtagtactagagtggtttttgcatcttgattgaatgtaagttta

SEQ ID NO: 2040 - DNA, 412 bp, Nicotiana tabacum
aacaattacaacagcttactaccgtggagccatgggtatcttgctggtatatgatgtgactgacgagtcatcgtttaacaacatcaggaattggatacgaaacattgaacaacacgcttctgacaatgtcaataaaatactcgtgggaaacaaggcagatatggatgaaagcaaacgggctgttcctacatccaagggtcaagcgctagctgatgaatatggcattaaattctttgagacaagtgccaagacaaatatgaatgttgaggaggttttcttttcaatagctcgggatataaagcaaagacttgctgaatctgacaatagagctgagcctcagaccatcaggattaatcaagccgaccagggagcaggaggtgctcaaactgcccaaaaatcagcttgctgtgga

SEQ ID NO: 2041 - DNA, 247 bp, Nicotiana tabacum
agatgctgctagggaggctgctcttcgtgaaatcaaggaaagaatcaagaagacaaaggatgaaaagaaggctaagaaagcagaggtgatggcaaagtcacagaaaggtggagggaagggtaatgtgtcaaagggagctgcaggaaaaggccctaagcttggcggcggcgatggaaaacgctaagccattgtttatgtttgtttttctaagtagtactagagtggtttttgcatcttgattgaatga

SEQ ID NO: 2042 - DNA, 248 bp, Nicotiana tabacum
gagatgctgctagggaggctgctcttcgtgaaatcaaggaaagaatcaagaagacaaaggatgaaaagaaggctaagaaagcagaggtgatggcaaagtcacagaaaggtggagggaagggtaatgtgtcaaagggagctgcaggaaaaggccctaagcttggcggcggcgatggaaaacgctaagccattgtttatgtttgtttttctaagtagtactagagtggtttttgcatcttgattgaatga

SEQ ID NO: 2043 - DNA, 262 bp, Nicotiana tabacum
gcacgacaggtttccgactggaaagcgggcagtgagcgcaacgcaattaatgtgagttagctcactcattaggcaccccaggctttacactttatgcttccggctcgtatgttgtgtggaattgtgagcggataacaatttcacacaggaaacagctatgaccatgattacgccaagctatttaggtgacactatagaatactcaagctatgcatccaacgcgttgggagctctcccatatggtcgacctgcaggcggccgc

SEQ ID NO: 2044 - DNA, 192 bp, Nicotiana tabacum
ttaatggagggatcagataaagaaggtttcgatataacaggaagtagagagatcaagatgatgccatttggcgctggtaggagaatatgcccaggctatgctttggctatgcttcatttagagtactttgtggctaatttggtttggcattttcgatgggaggctgtggagggagatgatgttgatctttca

SEQ ID NO: 2045 - DNA, 460 bp, Nicotiana tabacum
tccgaacaattacaacagcttactaccgtggagccatgggtatcttgctggtatatgatgtgactgacgagtcatcgtttaacaacatcaggaattggatacgaaacattgaacaacatgcttctgacaatgtcaataaaatactcgtgggaaacaaggcagatatggatgaaagcaaacgggctgttcctacatccaagggtcaagcgctagccgatgaatatggcattaaattctttgagacgagtgccaagacgaatatgaatgttgaggaggttttcttttcaatagctcgggatataaaacaaagacttgctgaatctgacaatagagccgagcctcagaccatcaggattaatcaacccgaccagggagcaggaggtgctcaaactgcccaaaaatcagcttgttgtggttcttaagaaattggcagtaacgaagataggatgatgagggagga

SEQ ID NO: 2046 - DNA, 398 bp, Nicotiana tabacum
ttggcactgcatctgcagctcagggatcagatgctttaaagaaatcggaggagcagaagaggaaggctagagctgagaggtttgggcttaaccaatcagatagtgctgacgaggaagctaagaagagagctaggttggcaaggtttacatctaccgcgaaggctgatcctgtagaggaagacaagaggaaagctagggccctcaggttttcacaatcccagtctggttcccaatcacaagagaatggcaaaggaaaaattgagcaggatactgttgtggtggagaaggccggaggaggaacataaaccactctcaaacttcgttcaacagtgaggcttgcttataatgtatagcttattgttgctgcgcagtgtaggagttttctttagagtgacttt

SEQ ID NO: 2047 - DNA, 392 bp, Nicotiana tabacum
cgtaacagaggatgcacccacaattgatcagtagtctgcggggaatcaatagctgcatttttaactaaatgcaaaattgtatacgagaaacttttgtctgcagatgtaacttttgtaaatgattggtcgtttacagtgtcttcaaacaagccactctattgctaataaggaaacaaaatgaacagcagcttaacgttttcctccgccaccgccaagcttaggaacttttgatgcacctcctttggggaggttgccctttcctccagctttctgggacttggccgtcacctctgctttcttagccttcttttcatcctttgtcttcttaatcctttccttaatttcacgaagagcagcctccctggcagcatctcgaactcgtggccgttcaa

SEQ ID NO: 2048 - DNA, 543 bp, Nicotiana tabacum
agtaggagcttcgagaaagtaaatagattgtgaagaaacattaacgtcatggaaaagattaattcctcctccctcatcatcctatcttcgttactgccaatttcttaagaaccacaacaagctgatttttgggcagtttgagcacctcctgctccctggtcgggttgattaatcctgatggtctgaggctcggctctattgtcagattcagcaagtctttgttttatatcccgagctattgaaaagaaaacctcctcaacattcatattcgtcttggcactcgtctcaaagaatttaatgccatattcatcggctagcgcttgacccttggatgtaggaacagcccgtttgctttcatccatatctgccttgtttcccacgagtattttattgacattgtcagaagcatgttgttcaatgtttcgtatccaattcctgatgttgttaaacgatgactcgtcagtcacatcatataccagcaagatacccatggctccacggtagtaagctgttgtaattgttcggaaccgctccggctcgaaa

SEQ ID NO: 2049 - DNA, 251 bp, Nicotiana tabacum
atcctcgagaaattatgccatatttctcgataagttgtgttcgacctctaatcgactgctctatgacgatttttctgttttcttagtgcttttgctcagtaaataataattgaaaattgatatatttttcatttttttccaaaataattaccatctggttactccattactctcttccggtacccaagttctactgctcctcctcaaatatctactgaatactgaagtgcttgaaccgctccggctcgaaa

SEQ ID NO: 2050 - DNA, 374 bp, Nicotiana tabacum
agttcgagatgctgccagggaggctgcttttcgtgaaattaaggaaaggattaagaagacaaaggatgaaaagaaggctaagaaagcagaggtgatggccaagtcccagaaagctggaggaaagggcaacctccccaaaggaggtgcatcaaaaggtcctaagcttggtggcggcggaggaaaacgctaagctgctgttccttttgtttccttattagcaattagagtggcttgtttgaagacactgtaaacgaccatcatttacaatagttacatctgcagacaaaagttactcgttgacgattttgcagttagttaaaaatgcagctattaattccccgtagactgctgaccagttgtgtgggtgcattcta

SEQ ID NO: 2051 - DNA, 347 bp, Nicotiana tabacum
tcgagatgctgctagggaggctgctcttcgtgaaatcaaggaaagaatcaagaagacaaaggatgaaaagaaggctaagaaagcagaggtgatggcaaagtcacagaaaggtggagggaaaggtaatgtgtcaaagggagctgcaggaaaaggccccaagcttggtggcggcggtggaaaacgttaagctattgtttatgtttgtgtttctaagtagtactagaatggttttgcatcttgattgaatgtaagtttttgatccaactgcagatcagcagttcaaacaaatatatttctgaattttggtcttgtttcaaatatgcagattaattactcttgttcccaaa

SEQ ID NO: 2052 - DNA, 248 bp, Nicotiana tabacum
tccgaacaattacaacagcttactaccgtggagccatgggtatcttgctggtatatgatgtgactgacgagtcatcgtttaacaacatcaggaattggatacgaaacattgaacaacatgcttctgacaatgtcaataaaatactcgtgggaaacaaggcagatatggatgaaagcaaacgggctgttcctacatccaagggtcaagcgctagccgatgaatatggcattaaattctttgagacgaga

SEQ ID NO: 2053 - DNA, 306 bp, Nicotiana tabacum
tctactaggaaataaagtgaaatgtgcagatggcaaggcttgtacacggaattgcgatccagatgtagcttacatggtttgcccatctactcgacaaaagattactaaaccatgtgtcaactgttgctcagcaaaaaaaggttgcaagcttttccgcagcaatggatctgtaaaatgtactggaacttagcttttgtccattattaataagctagctacaaggccactacttaggatatctgtgcaataaggcttgacaatatataagttctcacgtgtgatttgtactatatattgagtatggta

SEQ ID NO: 2054 - DNA, 215 bp, Nicotiana tabacum
cacgagttcgagatgctgccagggaggctgctcttcgtgaaattaaggaaaggattaagaagacaaaggatgagaagaaggctaagaaagcagaggtgacggccaagtcccagaaagctggaggaaagggcaacctccccaaaggaggtgcatcaaaagttcctaagcttggcggtggcggaggaaaacgttaagctgctgttcattttgtttca

SEQ ID NO: 2055 - DNA, 356 bp, Nicotiana tabacum
ttggcactgcatctgcagctcagggatcagatgctttaaaggaatcggaggagcagaagaggaaggctagagctgagaggtttgggcttaaccaatcagatagtgctgacgaggaagctaagaagaaagctaggttggcaaggtttacatctaccgcgaaggctgatcctgtagaggaagacaagaggaaagctagggccctcaggttttcacaatcccagtctggttcccaatcacaagagaatggcaaaggaaaaattgagcaggatactgttgtggtggagaaggccggaggaggaacataaaccactctcaaacttcgttcaacagtgaggcttgcttataatgtatagcta

SEQ ID NO: 2056 - DNA, 312 bp, Nicotiana tabacum
ttcgagatgctgccagggaggctgctcttcgtgaaattaaggaaaggattaagaagacaaaggatgaaaagaaggctaagaaagcagaggtgacggccaagtcccagaaagctggaggaaagggcaacctccccaaaggaggtgcatcaaaagttcctaagcttggcggtggcggaggaaaacgttaagctgctgttcattttgtttccttattagcaatagagtggcttgtttgaagacactgtaaacgaccaatcatttacaaaagttacatctgcagacaaaagtttctcgtatacaattttgcattta

SEQ ID NO: 2057 - DNA, 310 bp, Nicotiana tabacum
tccgaacaattacaacagcttactaccgtggagccatgggtatcttgctggtatatgatgtgactgacgagtcatcgtttaacaacatcaggaattggatacgaaacattgaacaacatgcttctgacaatgtcaataaaatactcgtgggaaacaaggcagatatggatgaaagcaaacgggctgttcctacatccaagggtcaagcgctagccgatgaatatggcattaaattctttgagacgagtgccaagacgaatatgaatgttgaggaggttttcttttcaatagctcgggatataaaacaaag

SEQ ID NO: 2058 - DNA, 250 bp, Nicotiana tabacum
tcgagatgctgctagggaggctgctcttcgtgaaatcaaggaaagaatcaagaagacaaaggatgaaaagaaggctaagaaagcagaggtgatggcaaagtcacagaaaggtggagggaagggtaatgtgtcaaagggagctgcaggaaaaggccctaagcttggcggcggcgatggaaaacgctaagccattgtttatgtttgtttttctaagtagtactagagtggtttttgcatcttgattgaatga

SEQ ID NO: 2059 - DNA, 288 bp, Nicotiana tabacum
tcgagatgctgctagggaggctgctcttcgtgaaatcaaggaaagaatcaagaagacaaaggatgaaaagaaggctaagaaagcagaggtgatggcaaagtcacagaaaggtggagggaaaggtaatgtgtcaaagggagctgcaggaaaaggccccaagcttggtggcggcggtggaaaacgttaagctattgtttatgtttgtgtttctaagtagtactagaatggttttgcatcttgattgaatgtaagtttttgatccaactgcagatcagcagttcaaacaaa

SEQ ID NO: 2060 - DNA, 290 bp, Nicotiana tabacum
tcaagcacttcagtattcagtagatatttgaggaggagcagtagaacttgggtaccggaagagagtaatggagtaaccagatggtaattattttggaaaaaaatgaaaaatatatcaattttcaattattatttactgagcaaaagcactaagaaaacagaacaaatccgtcatagagcagtcgattagaggtcgaacacaacttatcgagaaatatggcataatttctcgaggattatctatcgagtttcaaacagttggcgagacgattttcggtgataagagaatta

SEQ ID NO: 2061 - DNA, 373 bp, Nicotiana tabacum
tccgaacaattacaacagcttactaccgtggagccatgggtatcttgctggtatatgatgtgactgacgagtcatcgtttaacaacatcaggaattggatacgaaacattgaacaacatgcttctgacaatgtcaataaaatactcgtgggaaacaaggcagatatggatgaaagcaaacgggctgttcctacatccaagggtcaagcgctagccgatgaatatggcattaaattctttgagacgagtgccaagacgaatatgaatgttgaggaggttttcttttcaatagctcgggatataaaacaaagacttgctgaatctgacaatagagccgagcctcagaccatcaggattaatcaacccgaccaggg

SEQ ID NO: 2062 - DNA, 563 bp, Nicotiana tabacum
tccgaacaattacaacagcttactaccgtggagccatgggtatcttgctggtatatgatgtgactgacgagtcatcgtttaacaacatcaggaattggatacgaaacattgaacaacatgcttctgacaatgtcaataaaatactcgtgggaaacaaggcagatatggatgaaagcaaacgggctgttcctacatccaagggtcaagcgctagccgatgaatatggcattaaattctttgagacgagtgccaagacgaatatgaatgttgaggaggttttcttttcaatagctcgggatataaaacaaagacttgctgaatctgacaatagagccgagcctcagaccatcaggattaatcaacccgaccagggagcaggaggtgctcaaactgcccaaaaatcagcttgttgtggttcttaagaaattggcagtaacgaagataggatgatgagggaggaggaattaatcttttccatgacgttaatgtttcttcacaatctatttactttctcgaagctcctactatgtctaaaattataatctaagtcttggcttattatt

SEQ ID NO: 2063 - DNA, 326 bp, Nicotiana tabacum
acgtttatctttctatagaaactaaatatccagtgacaatcaacttagggccgcaacagattatatacactccagccctgctgcgtgcccaaagaaaagaagatgcacaacttggatccatgcaagttttggttcatatcaaaatgatggaagtcaccaatccatctccataccatgccatgtggtcatctcaaagggacaaccgataggctcatgcactaattatctatgtagaattgggagagcacatgcaagagaagcatgatttccctccttgtatacaagatttccgcgcacaaaggttgccaaacctttccggctcgaaa

SEQ ID NO: 2064 - DNA, 288 bp, Nicotiana tabacum
tcaagcacttcagtattcagtagatatttgaggaggagcagtagaacttgggtaccggaagagagtaatggagtaaccagatggtaattattttggaaaaaaatgaaaaatatatcaattttcaattattatttactgagcaaaagcactaagaaaacagaaaaatcgtcatagagcagtcgattagaggtcgaacacaacttatcgagaaatatggcataatttctcgaggattatctatcgagtttcaaacagttggcgagacgattttcggtgataagagaatta

SEQ ID NO: 2065 - DNA, 279 bp, Nicotiana tabacum
atggcataccgccacccctagccttggagtaggacacatagtagaactgggagattatgctggtgaagaaaatgaaagctgctccagctgcaaaaactccttttctcagagtttcacaagatagaggcttgtcgttaatcaagtatgatgatcggtacttggtgtgataagcattcctaactgaaccagccaacaagcagacctcagcaatgaagaatgtaacccagcatatgatgaacaagagaacagcacaagcccttgaacctctccggctcgaaa

SEQ ID NO: 2066 - DNA, 394 bp, Nicotiana tabacum
gttctccaaacctatttgccgcctctccttttttctcccaaaacttgccgacactaaacgaaggagagaaacagagagtagcagtagatatggcaggaaaaggtgaaggaccggcgatcggtatcgatctcggaaccacttactcttgcgtcggagtttggcagcacgatcgtgttgagatcatcgccaatgatcaaggaaacagaacgacgccgtcttacgttggattcactgatactgagcgtctcattggcgatgctgctaagaatcaggtcgctatgaaccctatcaacaccgtctttgatgcaaaaaggctgattggtaggagatttgctgatgcctcagtgcagagtgacattaagcattggccatttaaggtcattcctggacctgg

SEQ ID NO: 2067 - DNA, 538 bp, Nicotiana tabacum
actaataggccctgatggtaccgagaacgaaattgaagtgtccgacgatcaatacatccttgatgcagcagaggatgctggtttggagctgccgtactcgtgcagggctggttcttgttgtacttgtgcaggacagttggtttcgggatcagtagaccaatccgaaggtgcattcctcgacgacgatcaaatggagaagggttatttgttgacttgcatttcgtacccgagatctgactgtgttattcatacaaacaaggaggaagaagttcattgaatattgttaatgtgctcattctgttttaaggcaattgcagagttttagtagaaagcttgttctggaaaagggaataggaaaataagaaaccataaagaaatagagttgttctgcatccagatagtaatgtttgtgtctggtttatggcataaattatgtttgtaagttgatatgtggtacttccacttgtattgctttcttgatctgctgaaccaaggattcttgaaacggaaaagggtcaaatatgtccttatactaaaa

SEQ ID NO: 2068 - DNA, 326 bp, Nicotiana tabacum
ctgaaatatggggttttgaagaagggaacaagtgcctgagtcatttacaagaatgcaggacttgcttcaaaaaggctctgatcttagtagcgtctcaacaggcccatcgatcagtgttagacctagctggtggactagcaaagaaccacaaatgcaacaatggttgacttttcctggtcctcaaaatcccgaacagttcggttttcattttcaagatcaggattcctcttctactcagtcgacgggtcaatcatgccctgaagttgctactgaaggagaaagcaaaatctatgggaaaagcaacatgccttttcaagcaggctatt

SEQ ID NO: 2069 - DNA, 545 bp, Nicotiana tabacum
gcacctccaaatgagtggcctgagattgtgggagatgatagatccaacctgcccttaaattcatttagaaacagagtcgaatctaaaagattttctataggaccagcatttatggagtggagcaagtctaaagctttggaacactctttagaccttattttgacctgattgcttttctccgcataatgctgtggaccaactgtaaatttttgatgacggatccatgtgcgttgatcattgttttttgcttcctccgattcataataataggttgcacaagctgagtgatccctgtgctccactgaagccatcacaaaacctctggaagcaagctcgcaacaaaaagtagtacagacaaaccggcaggccccgaatccgtgagagaaaattatcgttttgaacttatcttctttcaagagaggtggtcctttctcaatgacaggtatgtgaagattacctccagaaatgagccagatggaccatttgaggagagagacccagatgctgacgactgaagcgaatccttcctcgtagttgggatgagc

SEQ ID NO: 2070 - DNA, 395 bp, Nicotiana tabacum
tttgtgattccgattagtgtgtaagagagaaattctttgcgaaaactccatttattttttttacgttaagggcgaattccagcacactggcggccgttactagtggatccgagctcggtaccaagcttgatgcatagcttgagtattctatagtgtcacctaaatagcttggcgtaatcatggtcatagctgtttcctgtgtgaaattgttatccgctcacaattccacacaacatacgagccggaagcataaagtgtaaagcctggggtgcctaatgagtgagctaactcacattaattgcgttgcgctcactgcccgctttccagtcgggaaacctgtcgtgccagctgcattaatgaatcggccaacgcgcggggagaggcggtttgcgtat

SEQ ID NO: 2071 - DNA, 502 bp, Nicotiana tabacum
tttgtttggccattcttataatgataagctctgaggttttagctagggagttgtctgagacttccaccacttcagaagaggactcaaagaaatccgataacaagaatgaagtgcatgaagctcaatatggtggcggataccccggtggtggctaccctggcggtggataccctggcggcggataccctggtggcggccgtggtggcggtggataccctggtggcggccgtggtggatacccaggtggcggccgcggtggtggacgtggaggatactgccgctatggttgttgcggccgccgcaattactacggctgcagcaggtgttgctactacaaaggtgaggccatggataaagtgactgaagggaagcctcaacactgatcatcgtgtaatatataaaacctttgtaatggcaaagctgtaatagtaatgctctttctacttcagagcttgctgtattaagtatgaataaaagccattatctaatatgtttgttaaaa

SEQ ID NO: 2072 - DNA, 403 bp, Nicotiana tabacum
tgttgatggacttcccccatatagtactggaagttagagggagaatgattattaatgccttgctgcaatattagcttagtagttagtagtgaatataattgaaactggatatttctatcttatgtgttgtacatttggttcattgcaaagggcgaattccagcacactggcggccgttactagtggatccgagctcggtaccaagcttgatgcatagcttgagtattctatagtgtcacctaaatagcttggcgtaatcatggtcatagctgtttcctgtgtgaaattgttatccgctcacaattccacacaacatacgagccggaagcataaagtgtaaagcctggggtgcctaatgagtgagctaactcacattaattgcgttgcgctcactgcccgcttt

SEQ ID NO: 2073 - DNA, 327 bp, Nicotiana tabacum
tttactttagctcaaagtgtcatcattctttgctttgttcttagcaacaagtttttctttgttttttgattgaaaaaaagaatggccgatcaatatgaaaagaaggttgaagagggtagcgcaaacgtggaggctacagatcgtggtttgtttgatttcctagggaaaaaggaagaggaaaagccaactcatgcccaagaggtacatgctatttcctctaagtttgttgaaaaagtaaaggtttctgaagaagttgcagaatacaaggaagaagagaagaaagaggagcacaacaaagaagagaagaaactccatcgatcaagtagc

SEQ ID NO: 2074 - DNA, 162 bp, Nicotiana tabacum
ttatgacttcatatgctcaggccccctcatcaataagataggtctgacacccgaaaaagtggctgagtccattgataagtggatagagtaaggatttcgcctttgtagatcgtttcagctcaaccagctggctctcaacgagcctcaaaaaattcgactcta

SEQ ID NO: 2075 - DNA, 463 bp, Nicotiana tabacum
gtttttccagttcttttgttttgattccacgcaaaaccccataaaaaaaccaaattacaattatatacaaagcagagaaatttcccaaaaaaggcaagaatattttcgagttcttttttggggggattctgattttcattcaaaaacccatttttaagctttttaacacagacgcaaatcattaggttttcaaagactgtgaatttttacaaagttgagaactttattaaaagagaagaaagcgagagaaaattgggtgtttggtttgatgttttgttgaaatcttcgttgatcacaattcaattcagagacttctgtgaatttacaaaagaattgaaaaaaagagaagataaaaggaggggttttgttattggagttttgatttgcaaatagaaaaagatgggcaggctttgttctgttattctacaaataatgaaaacattctgagagggctcgttatatg

SEQ ID NO: 2076 - DNA, 474 bp, Nicotiana tabacum
tctagtaagtacaactctttgctgcaaatacaaaaaattccgatggcgatgagacgtgtggcttctacagcagctcgtgcttttgcttcctcttcaccatcaccgtcctccttagtttttactagagaacttcaggcttcccctggtagcaaaaagattgttggtgttttctataaagcaaacgaatatgctgaaatgaaccccaactttgtgggctgtgccgaaaatgccttggggatacgcgaatggttagaatctaaaggtcattagtacatagtcactcctgacaaagaaggaccagattgtgagcttgagaaacacattcctgatctccacgtgttgattactactccttttcatcctgcctatgtcacggctgaaaggatcaagaaggcgaaaaatttacaacttctgctgacagctggaattggatcagatcatgttgatctgaaagctgctgctgctgcagggttg

SEQ ID NO: 2077 - DNA, 388 bp, Nicotiana tabacum
acgaaactgcaaaagctggcgtaacatctaaatacgtaactccaaagtcaagttggtcctgtaaagacgcataattcaacgtcttgcgcgacgcccgccacctgacctagcaccaggatggcgagcatattgcagccttaagttgaccgaatcacggtcatgatcgtcgaatttataaccttgtaaggcatccattgcagtagctgcatgggctggactcacaaaatcaacaaagcaaagaaccaagggatgccctcctgggtgtcgtgattctttgatcacaagtctaacttctctgtaacctacaaatggtcgaaatatatgtgacatctctcttcgggtgcaattagctggcaacccttcaacaaacaatgtactgctggcatta

SEQ ID NO: 2078 - DNA, 264 bp, Nicotiana tabacum
ctcttcccctctgctgcctattagcgctagtagagtaggattgacccgtaatacagaacctctaggcgtaacctttcgcttaatactagaatcgagaatcgaaacatagcatctgaggttgcattaatcgaggatacacgacagaaggaattgttctatttccaaacttcaccttcaaaaagcgtagattttttcaaaaattttctcgaatcacgtgtttttctcctcgtaagactgagagaaatgactaaatatgaaataaaa

SEQ ID NO: 2079 - DNA, 355 bp, Nicotiana tabacum
gcggcattttgccttcctgtttttgctcacccagaaacgctggtgaaagtaaaagatgctgaagatcagttgggtgcacgagtgggttacatcgaactggatctcaacagcggtaagatccttgagagttttcgccccgaagaacgttttccaatgatgagcacttttaaagttctgctatgtggcgcggtattatcccgtattgacgccgggcaagagcaactcggtcgccgcatacactattctcagaatgacttggttgagtactcaccagtcacagaaaagcatcttacggatggcatgacagtaagagaattatgcagtgctgccataaccatgagtgataacactgcgg

SEQ ID NO: 2080 - DNA, 279 bp, Nicotiana tabacum
ttttcccttcgtacagaaagttacttgcatttttaaaccaaaacgaacattcatatttttacaggagcttgtcaatgcaatgcagcaaacgataaggcaaacagcaccaagccagaatactagggccaaaacaaacgtgttccaataaaatttcaaagaagaggtttcaatctgtaaatgtaacatggatgagccctggtgctcctgatttgcggtcagctatgacatctttcttccttaaaatcagtctgcagtccagctctgctccacaacttctct

SEQ ID NO: 2081 - DNA, 193 bp, Nicotiana tabacum
atatcaaatggttagaaaaaaaacactaaaatggaatttctaacccaatgtaaatcataggtcgatgtaactcattattttatttttatattttgaagaaaaaaaaacatcgggggaaagatttttggtggtggcttggtggcatgtaatactcaataattttaatgtgattttggttttgattgtaacaaaa

SEQ ID NO: 2082 - DNA, 350 bp, Nicotiana tabacum
agacaaaaccacaccctcatcagccctcgccggaatctcgttttcacggtgaccggccgttcaaccttctactgaattctttcagctctgaggtcatataattaacctccgatctgaagaagtagttatatatatagctgcttctttttattctgagaacaaaagaacccctgagctgggtaaagtggagttcgtgatgggattttgtatatgtcctttggaaactcctgctagattgctgtggagtactagtttcttccgccacaagctcatgctcttttgaaacttagtcaactctctttttttatacacatccctgctaaaattaaagaaactctgctctagagttt

SEQ ID NO: 2083 - DNA, 354 bp, Nicotiana tabacum
aacactacatacagacaaaaccacacgtagcgtacattaattctcccaccggccctcaccggaatcttgttttcacggtcaccggccgttcaaccttttactgacttcccctttttctttttctctcagctcagaggtcatataattaacctccgatctgaagtagtagttatatatatatatagctgcttctttttattctcagaacgaaagaacccctgagctgggtaaagtggagttcgcgatgggattttgtatctgtcctttggaaactcctgctagattgctgtggagtactagtttcttctgccacaagctcatgctcttttgaaacttagtcaacgatctcttttt

SEQ ID NO: 2084 - DNA, 383 bp, Nicotiana tabacum
aatgcaacacttgcgaaggcacatatgtttaagatttgaacagccttttcccactgcttcaagacttacatcggtcactcctctgcacaaagtgatcgacaaagaagccagagactgaagaccacgagcattacccataacccaaaaccccttctgactgacattacgaagtgaaccgagattaagatcggtaatcaccttgccatagtgaccgatgacagcaagcgagaaatccgtgatgtttagggaattaagtttcactttcttcaacattgtagcacctgacgagagaaggctagcaactccctgatcccctacaagagggcagtctttaatagtaagagactgcaatttggtacagcatcttccaatagcttgcaggc

SEQ ID NO: 2085 - DNA, 265 bp, Nicotiana tabacum
atccgagctctttcctctcagaaacttaccaagttcagcatcaaatggctggccataggattgcacatgccacattgaaaggccctagtgtggtgaaggaaatagttattgcaactgtacttggtttggctgctggtagcttatggaagatgcaccactggaatgagccacgaaaagttaggtcattttatgacttgctggagaaaggtgaaataagtttagtcgcagaagaataacttttcgaggatctcgcgtgagttggctc

SEQ ID NO: 2086 - DNA, 350 bp, Nicotiana tabacum
  misc_feature (100)..(100): n = a, t, c, or g
tttccagaatgttgcatttcatgagcgtacacattcaggccttggcctaaatgggcttcacaacattggattgatgataaaattgccacacactggtatntaattgaaaaagagagatacaaagagagaaggagagaaattctatatatggtttgtaagtagcccaatgaactcgaattaaattacatcaacaacaatgggttgttggtcaccggacatacgcctacagttgtttcttgtggccgtcaactgatacggcgaacgatcggtgctaagccactgatcccacgttgaacagctgttgactgcattgcttgtggtctcctgttgaggtgacttccacgtacccc

SEQ ID NO: 2087 - DNA, 339 bp, Nicotiana tabacum
tttgttcttaaatatatatcaatcatttattcatgtggattaaatgacaaatcaaatgaaacacatcctgcataacatgcatacggcccacgccaataaattataacatcagggcttgctattattttggctatatatgttatctatgaatatcttagtagaggcaaacctagcttataattatgcgttcacctaattctaaatagcttttgctcatataagttcacatctgttataaatatttaattaagaaaaatcttgagtccgccctctgtatgctaagcctttggaataaaatcttgaaaaccggacgattgacagccaaacgcctcgatccat

SEQ ID NO: 2088 - DNA, 371 bp, Nicotiana tabacum
tataaaaagccgcatttatttatcgccaaacaatggagtacatggaaacgttaaccatacagctccaatttattatttggaggctacatatatgcctataatcccttagccaacctggggagtttgtacaacaaagtccaatacattaacgaaaagacgaactcgattacatcttaaatcttctgtcacaggagtaccattaagtactgtttgaacattagttagttttggattttccttctgaattatttgcatagcaaactttgctggtgttccaagaagttctggccatctttcctttgtcactcctgggcaaccagactgagacacatcaagttgcaagacattgatttccaaatctcgagcagtga

SEQ ID NO: 2089 - DNA, 348 bp, Nicotiana tabacum
cgggaggtgagtcaatctacggcgccaaattcgccgacgagaacttcaaaagaaagcacaccggtcctggaatcctctccatggctaatgctggacctggaaccaacggttctcaattcttcatctgcaccgctaagactgagtggctcgatggcaagcatgttgtgttcggtcaagttgttgaaggctatgatgtgattaagaaggctgaggctgttggatctggatctggcaggtgctccaagcctgttgtgattgctgactgtggtcaactctgctagatctgaggacgttgatgatgatctagtttatctatatttaagtcgccgtttttggctttgtttttaa

SEQ ID NO: 2090 - DNA, 406 bp, Nicotiana tabacum
ttttatttaaaagccacatttatttatagccaaatataagtggaatacatggagagattaaccatacagctccaatttattttctggaggctacataaatatatcatcccttaaccaatctggggagtttgtacaataaagtccaatacattaacaaaaagacgaacacgattacatcttaaatcttctgtaacaggaccaccattcagtatagtttgaacattagttagttttggattttccttctgaattatttgcatagcaaacttagctggtgtcccaagaagttctggccatctttcctttgtcactcctgggcaaccagactgagacacatcaagttgcaagacattgatttccaaatctcgagcagtgaggggttgaataagtgatgcaagaagcaaga

SEQ ID NO: 2091 - DNA, 378 bp, Nicotiana tabacum
tttaagctaaaacttagttgcattatgccttcattgatcattatcaaaatgctaaaatacaagccaactattgctccacaattgtacataaatggaatttcatgagaaaatttacattgtgcgtaatgcaagctctaaaaaacagccttagcgcattaatgcacattgttgaacccacaaacaatgatcacttttctcgttctttttggacatttggtgcacttggagcttcagccatctgatcatccatcttatctttatttgagctggttgagctattcccattccggcaggcagccaactcctttggttctgagtcggaaaatgctggagagggagagggtgaagtcgtttcttcctcaattggaagtgttagtt

SEQ ID NO: 2092 - DNA, 280 bp, Nicotiana tabacum
agtccaccatcagacacaaagcaacacttgcgaaggcacatatgtttaagatttgaacagccttttcccactgcttcaagacttacatcggtcactcctctgcacaaagtgatcgacaaagaagccagagactgaagaccacgagcattacccataacccaaaaccccttctgactgacattacgaagtgaaccgagattaagatcggtaatcaccttgccatagtgaccgatgacagcaagcgagaaatccgtgatgtttagggaattaagtttcactt

SEQ ID NO: 2093 - DNA, 382 bp, Nicotiana tabacum
tttatatcaatgaacattaagtgcgccggaaaacaaaaaaggaaaatatctgctaacatccaaagaatataggaatacaagaaatctgaaaaaacagaaataaactctgtggacatgcatgatgtgaagatcaagaacagaaccatgataaaagaaaactaccaatcaagatggcatcttatttcctcaaaattgatagatggtgatctgccattaacctccagaggaaccttgaaatcacactcaatctttggcttaattttgggtgttttaatccaaccagccttaagcctaatacgcatgtaaagcttcacttccatctcatatacccctaaatccttctcattactgtaattggatttctctctgtcacccaatagaa

SEQ ID NO: 2094 - DNA, 402 bp, Nicotiana tabacum
ttaatctgcttcaagcgtcaggatcacggagtgctcttggtaggttatggttctcatggctttgctcctatcagactcaaggaaaaggcttactggatcatcaagaattcttggggagaaaactggggagagcatggatattacaagatttgcaggggtcacaatatctgtggagttgatgccatggtctctactgtgactgctgcccatactactaatcctaacctgtgagatgaacttatccgaggaatgttgtctgtgatcaagggttttactacattatcctaatttgtgtaaatatgttatttagtaatgtattgtgaactcaagtcttagatttcatcagcactttattatcgtgcttcaaaccacgtagtgggatttgtatttctgtagtttata

SEQ ID NO: 2095 - DNA, 473 bp, Nicotiana tabacum
ccaggatgatcctgtgattcagtgcattaaagaacaaggattagatcttagctttggaggaacaaaggaaaataataattaccccttgatgcagatgtgtgttgatacttattttgcgcagagaaaaccgcttcaggcattaaccctgttacataattatgcctggataatgtccagtgaaacgactgcatttcaggaacgctatgattttaatatcgatgaatggcgggcaaaattcaggcagttatgtttagagtattttggcgatagtcgtacacagttcacttaacgctctgcgtctatctactatcccttctttttcagaaaaaccgccgagcatgtcggcggctttctgacttacaaagtaacagattacatcagcggcattgccaaacgcacaatgctaatcagcggttgtggccatacacccagcaccagtaccaacagtgcagagatcagcacaacgataccgc

SEQ ID NO: 2096 - DNA, 571 bp, Nicotiana tabacum
attcccttttttgcggcattttgccttcctgtttttgctcacccagaaacgctggtgaaagtaaaagatgctgaagatcagttgggtgcacgagtgggttacatcgaactggatctcaacagcggtaagatccttgagagttttcgccccgaagaacgttttccaatgatgagcacttttaaagttctgctatgtggcgcggtattatcccgtattgacgccgggcaagagcaactcggtcgccgcatacactattctcagaatgacttggttgagtactcaccagtcacagaaaagcatcttacggatggcatgacagtaagagaattatgcagtgctgccataaccatgagtgataacactgcggccaacttacttctgacaacgatcggaggaccgaaggagctaaccgcttttttgcacaacatgggggatcatgtaactcgccttgatcgttgggaaccggagctgaatgaagccataccaaacgacgagcgtgacaccacgatgcctgtagcaatggcaacaacgttgcgcaaactattaactggcgaactacttactctagctt

SEQ ID NO: 2097 - DNA, 172 bp, Nicotiana tabacum
tcgctttcgcccactgtttacgcatgacattacgcaaacagccacaggcggaagtgctggctcattatctcaagactgaagatcttcagcgtgtactggcttcgaactctccagctaaccgtatcttgttaataatgggagaatggttggcggttcagcgccgcaatggaca

SEQ ID NO: 2098 - DNA, 255 bp, Nicotiana tabacum
taaaaataatacatttggtgtcaaattatttcaccaaggcaaagtattagttccacatgttttcaatagcttacttatctttcactggaacactcatttctgtgaaatgagtttacatataatttgatgatgttaagctatttattccctgtaatggtaaactgatactccatatttctgataactggcctaagatgcctccattgtacattatttctttcatatatcatcatatagcagaacttcttttgaaaa

SEQ ID NO: 2099 - DNA, 250 bp, Nicotiana tabacum
cattcgtgactatacttctcatattaatccttacatctgatcttaatgactttggatttggaaatcatctatttgtcgaaaatccaaaattcgaagacccacccatctttgatgaaatcaaggatggttcgaggtttctgtacatataattcaagaagatgtggggagagtacctatgtacatagttggggttctctccttatttgttcttattagctgtgatgatgtgatatgcatctcgttcataaat

SEQ ID NO: 2100 - DNA, 269 bp, Nicotiana tabacum
ttttaattgtaaacggtaaatcttcattcacttcattccagagaactttgtaaatacagatccacaacgtaacatcacggtaacaatctcacggtcaaaaacgaggacggtagcaggaaccacagtaaaccataacggaacttcaaccaaacttagaaccataaatttcaaaccaaaaaaataaatctaaaggcaacggaaaatctaactcctccagtttccttcagagccaccaccgtaaccaccttcacgacggccacctccataac

SEQ ID NO: 2101 - DNA, 250 bp, Nicotiana tabacum
ttttacaccaaagagatatattataacgccattgtgtaccaaacataattacataatgtcttttattcatacataacacaacaagttttaaagtagaaagagaattactattacaactttaccattacaaaggttttatatcttacacgatgatcagtgttgaggcttcccttcagtcactttatccatggcctcacctttgtagtagcaacacctgctgcagccgtagtaattgcggcgaccgcaacaa

SEQ ID NO: 2102 - DNA, 356 bp, Nicotiana tabacum
accgtctccacttttggtcccaagatgaatgcagggaagatacggatataaacggctacactattccaatcactagtgaattcgcggccgcctgcaggtcgaccatatgggatgagctcccaacgcgttggatgcatagcttgagtattctatagtgtcacctaaatagcttggcgtaatcatggtcatagctgtttcctgtgtgaaattgttatccgctcacaattccacacaacatacgagccggaagcataaagtgtaaagcctggggtgcctaatgagtgagctaactcacattaattgcgttgcgctcactgcccgctttccagtcgggaaacctgtcgtgccagctgcat

SEQ ID NO: 2103 - DNA, 299 bp, Nicotiana tabacum
catggatattacaagatttgcaggggtcacaatatctgtggagttgatgccatggtctctactgtgactgctgcccatactactaatcctaacctgtgagatgaacttatcccaggaatgttgtctgtgatcaagggttttactacattatcctaatttgtgtaaatatgtcgttcagtaaatgtactgtgaactcaagtcttagattccatcagcactttattatcgtgcctcaaaccacgtattgggatttgtatttctgtagtttatactgcaaaaatgaagttcgaattttaaaa

SEQ ID NO: 2104 - DNA, 263 bp, Nicotiana tabacum
gaacactcaagtctaagctttaattggacttaggaatgaaacgagtagcagaagattgtccttgctgcgtgaatatccaaattatgtactaccttatgctagctgctactataattgtttgtcatatagaggtgctgaaaccaataaatatgttcttgtaatcaaccaaagaaatgttaaagcattagatgctgtttgaatgtaacaatagacgtacttgggaaaattgtgggaaataataatagaacatttgttaattaaaa

SEQ ID NO: 2105 - DNA, 317 bp, Nicotiana tabacum
atattatggtggtggttataaacgtagaggatgccgctatggttgctgcaggaaaggttacaaaggatgcaaaaggtgttgttcctacgcaggtgaggccatggataaagtcactgaagctcagcctcacaactgatcattatgtgtaatatataaagagtgtaagttatatatgccgttagcgtatataacttatacattgtgctactttagaccttgcttgtaacaagtatgaataaagccattcggttcttagggatggttggtcatgtaatgttttgttgtacaatatattgtgataatatgtttccataaaa

SEQ ID NO: 2106 - DNA, 162 bp, Nicotiana tabacum
tttgcatataatagaggtttgaattatacgttcgaattacaccacttattcatcatacaaaagtgcgggtagataagaaaaacagtaataatacattctaaaatccctttaattattcaagaccagaaccacccaataggctctccttcttcatgttgctgc

SEQ ID NO: 2107 - DNA, 442 bp, Nicotiana tabacum
ttttggtcaaaattagattaattattgtgtctaataataaacaaaaggaaccttattatacatgatacacaatactggaatataatgtattgtcttattgtatgaactaaaaaccttgcaaccatacaaaaaatctcacctatatagcccttcttctttaattcttccaagaactccattaaattaagctattcttgctccctgtgatttgtgggaatcaagtagaggtcatctttgcttgctgcaaaaactctacttgtttcagtagtgcgaaaatcatttgcattaaccttgtcagggagtttccagtcaaagcaatagagcaactgggctaaaggatgccctgtgttaactaaaccaaacgacattcctggacacattcttcttcctgaaccgaaaggaatgaactgatagtgatttcctgtaagatcaacagaagtat

SEQ ID NO: 2108 - DNA, 512 bp, Nicotiana tabacum
gaaaatgataacatcaaagcagttattcttgttctcgttgtgctactggtggttacggtcatgcagtctcttaaagaggagccctcaagagaccacgtagatcatccaagtagttctgcatctccatcagaagcacttcgctctggagacaaagaagacaagatagactaaaattttcactttggtgaacgtcaatcccaatctgaccgagataagttgcttgagaaatctttgaaaagatgagcaatcgacatggcagtcactgagtggttcaaccatgttggtaaccataatcatcgtaagccagtatacgagcaactatagttgtaagattgcttctagcgttttctgcatccagtgataggaaatgaatactcagtgcaaggatttgttgacagtaacggttctgaaaatggagacaaattttgtttcgttctgtgtaaatgagttcaagacgaaaaacaaaaatgctgcgagttctatttcgcagcttgtccactgttataataaaa

SEQ ID NO: 2109 - DNA, 360 bp, Nicotiana tabacum
ttttagacaaggaacttttatttctggatagaaatttcgttttcatcaatgcagtagcctcatcacttaaaagcgcctcatatataggagctattggttcttcccaagaagacaaataacagaaatatttcacctaattcttaatggatacacaatccccttattcattaattaatacaaatataacttgtatacataacatgatctgcattctatgtaacgaagcctagccctggccgaagttcctttggttgtaacagtccaagttttcccccggagcaacatttaacataccacaatacctcctgtagtatccaattcgatcttccactgcgtcattccgtcctatgccacattcaa

SEQ ID NO: 2110 - DNA, 158 bp, Nicotiana tabacum
attatgtcattagtaagttattagtgctttgtaatgcaacttaggatttcggttagttaacagatgcttgcttgatgatgcttttaatcctactttggatgctttattctactgtggatttttttgctatatgctattttacatgttttaagccaaaa

SEQ ID NO: 2111 - DNA, 410 bp, Nicotiana tabacum
gttggtttgaagaagcgatcccttgacgttaatagcataaatgctgcaagagtagccagactacaagacagatatgggaagaatgtgaatggcatagaaaagaaattgggtgactcagatttggatatagtctccttaaagaactacttggatgcgcagtactatggagagattggtgttggttcacctcctcagaaattcgaagttatctttgatacagggagctctaacctctgggttccatcatcaagatgctacttctctattgcttgctggttccactccaagtacaaggcgagcaagtccactacatatacaagaaatggggaatcttgtccaatccgctatggaactggatctatctctggccatttcagtcaagacaatgttcaagttggtgatctggtagt

SEQ ID NO: 2112 - DNA, 282 bp, Nicotiana tabacum
gtatggatttcgcctttgtagattgtttcagctcaaccagctggctctcaacgagcctcaaaaaattcgactctaccactactatattccagtcttcttgtggtgtgaacaggaaatttcacagcatagttccaagttcaaagacaacgaagaaatccctccgttggtgattggcttcagtgcgcctcaaggatgtggaaagacaacactcgtatttgcattagaatatctttttaaaatcacagggaggaaagctgctacactatccattgatgattttta

SEQ ID NO: 2113 - DNA, 217 bp, Nicotiana tabacum
cactgatagacataacttggatcatgaatcttgatgataatccatgattttacatacttataccatgcatcataataagcttctaagttcttgttgactgtctcaagctgtggatcaacagctttgacagcttcaggtggaagaggtttgaaaccaagcatccaaccctcaaacagaattaccgttaaaggcccttcaacctctggccatgtggagg

SEQ ID NO: 2114 - DNA, 395 bp, Nicotiana tabacum
gaccgtattcctccattgcggtcatgcagagtaccattccaactccgcacaagttgtgcttcctgctcaagacccacatcagaaggcttgattttgtccagtagggaacggactttctcgagagcatcttctgaaaccggtccattaggcgaaagtgatgctttacaagcgttataaagcttttgtacagctggcatgttccgcaaatcgagaatcgttatacccaccgcctatacaacaaaacttatcttactgtggctaaaagcttcgaactaacccaaaaattttccagcctgaagggtcctctatttcccgaagacccctcaagaacagcctttcaagcagaagacccttcaatagcacaattgggcacaaactggactgtacgatgcaaa

SEQ ID NO: 2115 - DNA, 461 bp, Nicotiana tabacum
atcctgtcctctcctgctcctcttcagacaatccttactataactcttttgttttgtttaaacctggtggcattgataatagagtatagaactgtatcagttaagctacacatggatatgtaatcatcggtttggtttgcatcgtacagtccagtttgtgcccaattgtgctattgaagggtcttctgcttgaaaggctgttcttgaggggtcttcgggaaatagaggacccttcaggctggaaaatttttgggttagttcgaagcttttagccacagtaagataagttttgttgtataggcggtgggtataacgattctcgatttgcggaacatgccagctgtacaaaagctttataacgcttgtaaagcatcactttcgcctaatggaccggtttcagaagatgctctcgagaaggtccgttccctactggacaaaatcaagccttctgatgtgggtct

SEQ ID NO: 2116 - DNA, 319 bp, Nicotiana tabacum
gaccgatagaaccggtatagaacgtcgaggtcaggttggtctggttggtgagaattttattactcacatctttggtattcgccgtgcgtgaccaggtccagctattcacatcgctggtgggctgagtaatattcgacgccccgcccataatcgccgtcatcaggtaatcctgctttacgcgcgaccaacgggtagtattgcgaatggtggtgttatcgttgatgtcgtgctcaaaacgcatggtggcggtgtcggtggtcgaatcgtcgtaatcggaatccgtgccgtaaaagttatgagtatcaacttttccggaatg

SEQ ID NO: 2117 - DNA, 284 bp, Nicotiana tabacum
tgcagggtgaagccagcactcaaaaatcccatgcgcatactcacaagcatctcctcgctggcatgcccccttgcgaaaatctggacaagggacacaactatagtggtattttctagggtcacgccttctggcgttttcaccagggtgtacaaagggacactctgtccagtcatgggagtaagctcttgagcatggtttcaccttaaatatgtacattctgaagtcatctgtcccatatatcccaatctttatgtccggaagagagggatcaacaggatactctt

SEQ ID NO: 2118 - DNA, 282 bp, Nicotiana tabacum
gcttcattgagaggtccatggcacgcttaaggcgctggattctggcatcaacaatctcccttggaaggcgattaagagcttccttgacgtccaaatcgtacattggatcatgcagatcatcatatctaagcccgtaattacggaggcgatgcggagagggatttcttgtggattgcagcgagagggttcttctttggatccaccagccatttcgagaacgtcggtgccattgttcgatcgtaaaacacacacccacacgcactgtgtctctgctaacaaaag

SEQ ID NO: 2119 - DNA, 332 bp, Nicotiana tabacum
gcaaatgcggaacaaaaccggattctcagattgaccggagaagcaaggaaggaaactaacagcacatcatcagccatgggttccgatcctgaaaagttgatgaccaaagccgataaactgacaaaattaagttttaccaggtggagtagcgattggagaagtgctactgttttatatgagcaggcagctaatggatttagggttgctaaaagttatgagaaagcaaaagaagcatttgagaaagcttcaaaaggacaagagatgctttcctcgccttgggatgctgctaaacatatggagtctgctgctaccatggcgaaggaactaggcaa

SEQ ID NO: 2120 - DNA, 196 bp, Nicotiana tabacum
ctacaatggttggtattttataacatgcaattatgatccaccaggtaattggagaggacaacgtccctacggtgatcttgcagagcaacagccctttgattccaagttggagcttccaactgatgtataataataataatggtgtacatgatcaaataatgaataaaagctttatcctgtgttaaggaaaattaaa

SEQ ID NO: 2121 - DNA, 342 bp, Nicotiana tabacum
tatgccatgggctccacgatagtagctgctagtgatagtcctaaaacgctcttgtccagcagtatcccaaatctgaagcttaatggtcttcccatcttgctccactgtccggattttaaaatcaactccaattgtgcttatgtagctctcctgatatgtgtcatcagcaaatcttaaaaggagacatgacttcccaacaccagaatcaccgataagcagaagcttgaacaggtagtcatattctggattcatggagactaaaagcagacggaagtcgccggaatattgagagatctaccggcgagaattggacggaatttgattcttcgcggcagaattcag

SEQ ID NO: 2122 - DNA, 232 bp, Nicotiana tabacum
ccaaaactaactaatgttcaaacagtacttaatggtactcctgtgacagaagatttaagatgtaatcgagttcgtcttttcgttaatgtgttggactttgttgtacaaactccccaggttggctaagggattataggcatatatgtagcctccaaataataaattggagctgtatggttaacgtttccatgtactccattgtttggcgataaataaatgcggctttttaaaa

SEQ ID NO: 2123 - DNA, 344 bp, Nicotiana tabacum
agctcttagacctattagagaagatgaagttactgctatggttgaaaacattttcaaggattgtactaagcctgataacacaggtaaaagcttgttgataagatgagtacttaggatcagtagcattcaacaacattacaaggttaacatttgggaaaaggttcatgaactcaaaaggtgagattgatgagcaaggtcaagaattcaagggtattgtctctaatggcatcaaaattggcggaaaacttcccttggcagagtatgttccatggctccgttggtttttcacaatggaaaacgaggcactcgtgaagcactctgcacgtagagaccggttaacaaga

SEQ ID NO: 2124 - DNA, 474 bp, Nicotiana tabacum
tcattcaatacaatacgagtaatgtaatcattattattacagattattattcttctcaagtattccaatcacattttgattattgaaaatcatagatctaaaatcttgacttgacttgacttgacacagtctaatatagaaatgcaactttgcaggacaatccaattccaaacgttgatcaagtaacctgatctaggccttgacgtcttgaacaattgttgtaattgcaaatcctgtttggttagcacgatggacagtccctgctagtttattgtctgaaacattcagtagctgcaaatttccccagtagatgagcttcaagactgagattggaattttccctgataatttattaccgttcaatctcatccatcgcaaagatattaaattgccaagagatgatgggatagggccactcagcttgttattgtctaatcccaaactcactagccttgtcaagttgcctaattggct

SEQ ID NO: 2125 - DNA, 545 bp, Nicotiana tabacum
tactgagtagatgtcaaccttctctcaataggagttttccgcttactcaccacaaacctgttaacccccttgcgcattggcattatcgatgggaagtcttcatctggtatctgactcaattcagaaatgtcttttatctgagcaacacggcggaaccacctctcagctttggcttcttcagacatgtccaagggatctgggtccttcacagcagacccttccaagctgtttcctgtccatccacttctgatattctggtttccaggcagctggggtgaacccactcccacagtctcagaaggggatacatcatctatcaccgagtttctactgccactactatcagtgcttgaagcatcggaagcaagagaagtctcacctatgtttctaatacgagggaacccctgatctccagagaaatttgaacttacaaaccttgagcttgtaaatcgatcatcagttctttgtacagtgttcatatctgtgaacttatatccagaatcatctgacttttgatgtgtcttctctacatctgccgtctcaga

SEQ ID NO: 2126 - DNA, 291 bp, Nicotiana tabacum
ttcattgagaggtccatggcacgcttaaggcgctggattctggcatcaacaatctcccttggaaggcgattaagagcttccttgacgtccaaatcgtacattggatcatgcagatcatcatatctaagcccgtaattacggaggcgagcggagagggatttcttgtggattgcagcgagagggttcttctttggatccaccagccatttcgagaacgtcgatgccattgttcgatcgtaaaacacacacccacacgcactgtgtctctgctaacaaaagattagggatttc

SEQ ID NO: 2127 - DNA, 517 bp, Nicotiana tabacum
taagcacatcctttagagtaaactactacttgttccaaaggattgaggaaaccgcggttcttagctgataatgtagagcaaacgaaatccagcacacaaatgtctgtacatacccctacaaccaacaaagtttgaattttgttgtttttcacccaatcaacaaatacattagagccatcctcctgaaaagaaccaatatagccatcgtagcaatctttacgcctgattgttacgttttgttccttctccaaccatcttagtgcaggaaccaaattggattcatcagtgccagtgatacagtgaggaggataagggtgttcaagtttgtgaggttggtgtgaatcaagaaaggcaagaataggtcatttcttgtcacagaacaatctagccagcctttttgattcctcaatcatttcagagatctgcctgtttggctctcttggtgccagatttccagctccaacagtgcaaaagccattgatgatatccacaagaacaagaccagctttcacatctt

SEQ ID NO: 2128 - DNA, 419 bp, Nicotiana tabacum
aattacaccacttgggctatgactaggattctcatatttgcgtttgtgtgaaatgggcttagaacacacttctgatatgagttcaaagcaattattcactttctccttgttaattttgagaaccccaagaagttgattttggtagtcaacagaattacaaggctcaacttgatgaataacgtgaagcataattgcagtggccaatacagacggcatataacgtacgaatctacaatcagccataatagagaggaggagattttcacatcttctaagaaattcccagtgaatattatttcttagcccaagcctccttataatatgatcaagaaatgaaagtggggtcactggattcatcctccattttagtgaagacaacactaaaagctccattctttgaatagtttttgcctcaaacc

SEQ ID NO: 2129 - DNA, 314 bp, Nicotiana tabacum
taaatgtgtaaacacagaaaagaaaaactcgagaacagagttcttttagcagggatatgtatagaaaaagagatcgttgactaagtttcaaaagagcatgagcttgcggcggaagaaactagtactccacagcaatctagcaggagtttccaaaggacagatacaaaatcccatcgcgaactccactttacccagctcaggggttctttcgttctgagaataaaaagaagcagctatatatatatataactactacttcagatcggaggttaattatatgacctctgagctgaaagaaaaagaaaaaggggaag

SEQ ID NO: 2130 - DNA, 535 bp, Nicotiana tabacum
aattacaccacttattcatcatacaagcgcagataattaagaaataccgtaaataatacattctaaaatccctttaattatttaagaccagaaccatccaataggctctccatcttcatgctgttgctcctctgccgccacaaagacattagagaagtagccatggccgccgccatcatcactaccatcatcctcctctgatggcaaaccatccataggtggaggaatattattgcatcctccagcccctattggatactcttcaatatgaccagtgtgaaaataggagtccccactgtccaccagctgtggactgtgctcatctaccaccgcgcttccgccgctgccactgctcagcctgtcctccgccttcaccttcacttgaagggtcatagcatcaacctccaaaacctcacatttttcacctactacccctgcttcaccaaccactttcccctgcagcttctccatcaatgaaaccacctcagctttgagcttctcattatctttgcgcatggagtcaaaatcagagaga

SEQ ID NO: 2131 - DNA, 510 bp, Nicotiana tabacum
tcttaatgaattacaccacttattcatcatacaaaagcgcgggtagataagaaaaacagtaataatacattctaaaatccctttaattattcaagaccagaaccacccaataggctctccttcttcatgttgctgctcctctgccgccacaaagacgttacagaagtagccatggccgccgccgtcatcactaccatcatcttcctccgactgcaaaccatccataggcggaggaatattattacatcctccagcccctagtggatactcttccatatgaccagtgtgaaaataggagtccccactgtccaccagctgtggactgtgctcatctaccaccgcacttccgccgctgccactgctcagcctgtcctccgccttcaccttcacttgaagggtcagcgcatctacctccaaaacctcacatttttcatttattacccctgcttcaccaaccactttcccctgcaacttctccatcaatgaaaccacctcagctttgagcttctc

SEQ ID NO: 2132 - DNA, 557 bp, Nicotiana tabacum
cttaatgaattacaccacttattcatcatacaaaagcgcgggtagataagaaaaacagtaataatacattctaaaatccctttaattattcaagaccagaaccacccaataggctctccttcttcatgttgctgctcctctgccgccacaaagacgttacagaagtagccatggccgccgccgtcatcactaccatcatcttcctccgactgcaaaccatccataggcggaggaatattattacatcctccagcccctagtggatactcttccatatgaccagtgtgaaaataggagtccccactgtccaccagctgtggactgtgctcatctaccaccgcacttccgccgctgccactgctcagcctgtcctccgccttcaccttcacttgaagggtcagcgcatctacctccaaaacctcacatttttcatttattacccctgcttcaccaaccactttcccctgcaacttctccatcaatgaaaccacctcagctctgagcttctcattatctttgcgattggagtcaaaatcagagagaagagagtcataaga

SEQ ID NO: 2133 - DNA, 248 bp, Nicotiana tabacum
ttttaaaaattcgaacttcatttttgcagtatgaactacagaaatacaaatcccactacgtggtttgaagcacgataataaagtgctgatgaaatctaagacttgagttcacaatacattactaaataacatatttacacaaattaggataatgtagtaaaacccttgatcacagacaacattcctcggataagttcatctcacaggttaggattagtagtatgggcagcagtcacagtagagaccat

SEQ ID NO: 2134 - DNA, 595 bp, Nicotiana tabacum
taatgaattacaccacttattcatcatacaagcgcagataattaagaaataccgtaaataatacattctaaaatccctttaattatttaagaccagaaccatccaataggctctccatcttcatgctgttgctcctctgccgccacaaagacattagagaagtagccatggccgccgccatcatcactaccatcatcctcctctgatggcaaaccatccataggtggaggaatattattgcatcctccagcccctattggatactcttcaatatgaccagtgtgaaaataggagtccccactgtccaccagctgtggactgtgctcatctaccaccgcgcttccgccgctgccactgctcagcctgtcctccgccttcaccttcacttgaagggtcatagcatcaacctccaaaacctcacatttttcacctactacccctgcttcaccaaccactttcccctgcagcttctccatcaatgaaaccacctcagctttgagcttctcattatctttgcgcatggagtcaaaatcagagagaagagagtcataagaggatttgagctgatcataatccctttcaagggtctgggtct

SEQ ID NO: 2135 - DNA, 474 bp, Nicotiana tabacum
gaattacaccacttattcatcatacaaaagcgcgggtagataagaaaaacagtaataatacattctaaaatccctttaattattcaagaccagaaccacccaataggctctccttcttcatgttgctgctcctctgccgccacaaagacgttacagaagtagccatggccgccgccgtcatcactaccatcatcttcctccgactgcaaaccatccataggcggaggaatattattacatcctccagcccctagtggatactcttccatatgaccagtgtgaaaataggagtccccactgtccaccagctgtggactgtgctcatctaccaccgcacttccgccgctgccactgctcagcctgtcctccgccttcaccttcacttgaagggtcagcgcatctacctccaaaacctcacatttttcatttattacccctgcttcaccaaccactttcccctgcaacttctccatc

SEQ ID NO: 2136 - DNA, 453 bp, Nicotiana tabacum
agctgcttctttttattctcagaacgaaagaacccctgagctgggtaaagtggagttcgcgatgggattttgtatctgtcctttggaaactcctgctagattgctgtggagtactagtttctcccgccacaagctcatgctcttttgaaacttagtcaacgatctctttttctatacatatccctgctaaaagaactctgttctcgagtttttcttttctgtgtttacacatttataaacttctgtgtgtgtaaatatattttctacggcgatcgtccaaatcatagaaaatatgggatctgggcatatatttttcgacccgtcttgtcacggcaacatgttgttccttgggaattcagatcctgttttccgaggaccaagatcgatgatgaagatggaggactcctcaaagaggcgacctttctttagctcgccggaggaactatatgacga

SEQ ID NO: 2137 - DNA, 201 bp, Nicotiana tabacum
gggctggttcattagttggagctttttcctggctgcgagtaggttgagaattgttaccaggctctccacttccaaacaggtatcccaaagaactctggccacctccagcacttactccgcgacccatctttaatcgactgatttctcaacaaaaaaccccaagtactttgttatcaatgccgaatcagttacagaagcgag

SEQ ID NO: 2138 - DNA, 211 bp, Nicotiana tabacum
gggctggttcattacttgcagctttttcctggctgcgagtaggttgagaattgttaccaggctctccacttccaaacaagtatcccaaagaactctggccacccccagcacttactccgcggcccatccttgattgattgatttctcaacaaaaagccccaagtacttaggtatcaatgccgaatcagttacagaagcgagagacggagag

SEQ ID NO: 2139 - DNA, 454 bp, Nicotiana tabacum
cttaaaaagagtttataatgcttaagcctgcagcagattccagaggcaatatcaactgctgtcattcaatgttagttggttgggcaaccagctggctcgcatagttaaggagattgctaacagcattttgggaggtggccttttcatcacctttggatcagaaaactctctttatctctttcctttatttgtcatttgttcaatgagttggttgtgatttgcaattcttgggcaaggagaggcagccagtaatgttagtgctaactgttttcccgttatttcttcgttgtttctttaagtaggtgatggcaggcaatacagaagccatccgacatctggaaatttggatctttccgggctgatgttttatgtactctagtttttcatagtttcaggcagtaccaatggctgcttttgtattcctatagaactgcaaaatgggaatgaatcgaat

SEQ ID NO: 2140 - DNA, 448 bp, Nicotiana tabacum
gagcttttggtaagccacagggtgtttgtgctcgtgttgcaattggtcaggttcttttatctgttcgttgcaaagatggaaacagtagccatgcacaagaaatctcccctttgcttagaatcactagtgaattcgcggccgcctgcaggtcgaccatatgggagagctcccaacgcgttggatgcatagcttgagtattctatagtgtcacctaaatagcttggcgtaatcatggtcatagctgtttcctgtgtgaaattgttatccgctcacaattccacacaacatacgagccggaagcataaagtgtaaagcctggggtgcctaatgagtgagctaactcacattaattgcgttgcgctcactgcccgctttccagtcgggaaacctgtcgtgccagctgcattaatgaatcggccaacgcgcggggagaggcggtttgcgtatt

SEQ ID NO: 2141 - DNA, 505 bp, Nicotiana tabacum
gtagctccggccgacggccaaagagtttatcaccgtcttctcctctaatttcaagctgctatgtctcaggttgataacagaaattcttctgctgccaaacgtgcccgaactgacggtggccgtagggaagatgactggacatgtccaagctgtgggaatgtcaatttctccttcagaaccacatgcaatatgcgcaactgtactcagtctaggcctgcagatcacaactcaaaatctgcagttaggccaatgcaagctccacatagctattcaccctctgctgcatatgttgggcctggtgcaccctcttcaatgtatatgggggtagcaccttatggtggttctttgttcaatggaccatccatgccagcctatgacgttcctttttctgggggctcagcttatcattacaatattgggagccgtctttctggtggcagcccataccgcccactgcatttctctgctccacctccttacactggtgggtctgtgattggaaatg

SEQ ID NO: 2142 - DNA, 408 bp, Nicotiana tabacum
caagacagaattaagtgatgatcttcaaggaagtctggaagcattggcgtggggaaaaaccccttccacagggactggtttttcattcgacattatctattctggaaagggatatgagcctgctgcaccaacagatgtgtatgctctgctgggcaaccatgtcacatcaaataagcaacaggtgaaggtcactcttgacgaagacaatgaaacggctgacaaggctcttgcacgacgtctttgtaaacttgatgatctcaatacaaagagatgtaaaagccagtggtcaattgcaaatttgagaagtttcctttcattcaacggcataaagaagctctctcaggcattgaagcaaatgctgtccaaatatgctattgatcgcgagttaagtgaagcagacaagtccat

SEQ ID NO: 2143 - DNA, 219 bp, Nicotiana tabacum
ttttactcgagaaaaagttgtgcttttaagctttgacaaggtaacatacattgaacctgcatattaagaaagaaacttaaaaggaaagtaaaacattgtaaaaaataaagaagtctcaaagtttgcagttcacacacacacacaaaatgcccggtacactaagctccgttatacgcgaggtccgaggaagggtcggaccacaagagtcaattgtacgca

SEQ ID NO: 2144 - DNA, 364 bp, Nicotiana tabacum
ttttaatccaaatgcattattgatctatataacatcaagacaaaaatacatatgtgactcttattcaggtcttaggtttattacagcaaagatcatgacttgatcacttcaaacaaagtacgtaactataaaaacgagtcaaatagattgtcttacactaacgtgtcgatagaataatttgaccaaaaggtgatcttattacagaaatagccactctacttagccacttcatcacttccaggcatttccaagggaaaatttgggtgagcttgaccattaggacaaaagataaccctataatttgtactaccaccagggcaagtaaaagtgctagtaggatcatcttgtgggtagctataggcat

SEQ ID NO: 2145 - DNA, 409 bp, Nicotiana tabacum
ttttccctacattttcacgcttatataatgaaatatttcatgaatgcacaacatctgcatgctactgtatgttttcagttacctgtatatgactagcaggattgagctgagaaattttgagaacaaaaaagaaaaaggaagagaaagaaaagatcgacgataactaactaatcttaaaagaacagtgactgactaatttttcaaccaacaaatatctactatgactcaacgatagctgcggtaagcggggctgtacatacagctctctgcatatgctactaggttcgcaggttccggtagacgagtggccaaacctagtttatatgctttagctgccactttggcagctatgttggctgaaatctttcttatgttggtaaatggcgggtatatgagccccttctcaaag

SEQ ID NO: 2146 - DNA, 116 bp, Nicotiana tabacum
tattgagggtgatggttttgccagtgagggtctttacaaagatttgcatcttgaaaaggttgttgggaatcaaacgagcgagaaaagagagcttcttagagaaggaaaagcagaac

SEQ ID NO: 2147 - DNA, 307 bp, Nicotiana tabacum
caagaatgaaagtgatgaatctgacttggattataaggagagtttctacatcggctttggcgtgtcttatggagcaatcttgctgggattagctgcagcactctacttcaatccttattggagaagggcatggtttacgcttgttgaggcattaatggtcacttcttactattttctcttagacaatgttgttagtcctttcaagaattggtggtgaaggaaggtaattgttattctcttattgttgctactttatcatttgctatgttgctactttatcaccctcaatattgggtctcgtaccgcc

SEQ ID NO: 2148 - DNA, 419 bp, Nicotiana tabacum
caccgatgcatattgacgaacgaaacgccggtaatacccagcaagtcccaagaaactacgcacttctttgatagacctgggaactggccaattcttgatcaccctcaatattgggtctcgtaccgccaatcactagtgaattcgcggccgcctgcaggtcgaccatatgggagagctcccaacgcgttggatgcatagcttgagtattctatagtgtcacctaaatagcttggcgtaatcatggtcatagctgtttcctgtgtgaaattgttatccgctcacaattccacacaacatacgagccggaagcataaagtgtaaagcctggggtgcctaatgagtgagctaactcacattaattgcgttgcgctcactgcccgctttccagtcgggaaacctgtcgtgccagctgcattaat

SEQ ID NO: 2149 - DNA, 329 bp, Nicotiana tabacum
tggtttcgtactttacctttctgttctctgcttttcttgtgtgccaatggaaagtagtaagaagcaagtgggttcatcattttctgcagatatttttgattccaccatagaatctactcagccatccaattccaccgggattttctcttcactttttccaccaccatctaaggttatgggaaggaaagcttcagcatctgaacttttgcaatctctggagaagcagtcgtctggttgtagggaatggaacaaaccacctccagctgatgtgacgaaagatagagaaggtgcagggcattgcacatccagtaaggaacgcgaatcacttt

SEQ ID NO: 2150 - DNA, 395 bp, Nicotiana tabacum
ttttacccaacaatcaactccttacccactcaatactcaatatcttcaatccaacatgagaacaaaaatacagaaaataaagctggaatataacaatgcaactgcatttctgatccagtaggaagtaagtattttcctttcatcaacattgtcactctaggaaaatcagaaacactttctgtggacaatagaaggaccagattcgtcatactctgcctttgcaatccacatctgctggaaggtgctgagggaagccaagatagagcctccaatccagacactgtatttgcctctctggtggggccaccaccttaatcttcatgctgctaggagccagtgcagtaatttctttgctcattctatcagcgataccccggaaccgtagggagaggaat

SEQ ID NO: 2151 - DNA, 247 bp, Nicotiana tabacum
gtcgtccggacttgcgttaccctagagccgcccctgtcacagagtaatcgtcgtccggtagaagatgaggccgatattgatgaagggccacgaaaggccattgacgtttctgaaatacaacagagacggggatctgctcttctcttgcgctaaggaccatacccctaccgtttggttcgccgataacggcgagcgtctcggcacttaccgtggtcataacggcgctgtttggtgttgcgacgtttcc

SEQ ID NO: 2152 - DNA, 316 bp, Nicotiana tabacum
ctgagtttcgttttaaatatggatatgaaatgccagtggatgtactgtctaaatggattgcagacaagtctcaggtttacacacagcatgcctatatgagaccccttggagtagttgctatgattttgggcattgatgaggagaaaggaccccagctcttcaagtgtgaccctgctggtcatttttttggtcataaggctacaagtgctggatctaaagaacaagaggcaattaattttttggagaagaaaatgaaaaatgaccctgctttctcctatgaggaaactgttcagactgcaatttctgctcttcaatt

SEQ ID NO: 2153 - DNA, 395 bp, Nicotiana tabacum
gtcgtccggacttgcgttaccctagagccgcccctgtcacagagtaatcgtcgtccggtagaagatgaggccgatattgatgaagggccacgaaaggccattgacgtttctgaaatacaacagagacggggatctgctcttctcttgcgctaaggaccatacccctaccgtttggttcgccgataacggcgagcgtctcggcacttaccgtggtcataacggcgctgtttggtgttgcgacgtttccagggattcggccaggctaataacaggaagcgcggatcagagtgcaaagctgtgggatgtccaaactggtacccaactgttcacattcaactttgattcccctgctaggtctgttgatttttcggttggtgataagctcgcagtgatca

SEQ ID NO: 2154 - DNA, 411 bp, Nicotiana tabacum
ttttagagaagtttatgtaatatttaaagacgtgttacagaaacctcataagatacgtaattctccctagaaaaaggagtgcaagttttccataaataccaaaacacttgacacaaaataacagtcagctttcctcccactatacaaatcaagcatcagctctttactccatccaccaaaaaatattgcaaaactacaacattgcaatctatattgagatagtatttgctatctcaatttgccaaaagattacaacatcaagaactgcagatgctttgattccacataattcagaaccctcttcctcttaagagatttctaaccaaaaacacctactcactataatacaaaacgtcatacttctattttgtgcctcgaatcatgctactctacatatgtctgtcgacactt

SEQ ID NO: 2155 - DNA, 420 bp, Nicotiana tabacum
aacaatgcaagagcaaagacgaaaacatgccacacatgaggaataccgattctctcattaacatattcaggccagttatctgggcttaaaagcagaagtccaacccagataacgatcatatacatggttctctccagaggttcattactgaacactcgtccgagaataacgagtggatccatttctatactcatcaaactgtaggggttgtaatagtttatccgatttctcgctgtaggggtacacgagaaccaccgagcctgatgtggttaaaagacaggcacaatctttactaccgcaatccactatttaaggtgatatatggaagaagaatttgaagagttcgaagagcatcctcaggatgtgatggaacaataccaggactatccgtatgactacgactattgataaaaatcaatt

SEQ ID NO: 2156 - DNA, 357 bp, Nicotiana tabacum
caatgttgaagaaagtgaaacttaattccctaaacatcacggatttctcgcttgctgtcatcggtcactatggcaaggtgattaccgatcttaatctcggttcacttcgtaatgtcagtcagaaggggttttgggttatgggtaatgctcgtggtcttcagtctctggcttctttgtcgatcactttgtgcagaggagtgaccgatgtaagtcttgaagcagtgggaaaaggctgttcaaatcttaaacatatgtgccttcgcaagtgttgcattgttccctgttgatggacttccccaatcactagtgaattcgcggccgcctgcaggtcgaccatatgggagagctcccaacgcc

SEQ ID NO: 2157 - DNA, 432 bp, Nicotiana tabacum
aacaatgcaagagcaaagacgaaaacatgccacacatgaggaataccgattctctcattaacatattcaggccagttatctgggcttaaaagcagaagtccaagcccagataacgatcatatacatggttctctccagaggttcattactgaacactcgtccgagaataacgagtggatccatttctatactcatcaaactgtaggggttgtaatagtttatccgatttctcgctgtaggggtacacgagaaccaccgagcctgatgtggttaaaagacaggcacaatctttactaccgcaatccactatttaaggtgatatatggaagaagaatttgaagagttcgaagagcatcctcgggatgtgatggaacaataccaggactatccgtatgactacgactattgataaaaatccatggtgtggacaat

SEQ ID NO: 2158 - DNA, 465 bp, Nicotiana tabacum
ggcttctgctgcatctggttttatggtggccacacccaatattgctacctctaacactgctcctcgcacctctatgttattcttctcctcctccaagaacaacaccaccaccaacttcccgaggctcgttgttagggccgcggaagaggctgcgccgccagctgctaccgccaccgctgaaggtgaagctcctcctgccaaagctgccaagccacctccgattggacccaagagaggaaccaaagtgagagttttaaggaaggagtcttactggtacaagggtgttggttcagttgtagctgttgatcaggatccaaacacacgctacccagtcgtagtaaggttcaacaaagtgaactatgctaatgtatctaccaacaactacgcattggatgaagtcgaagaagtgaaatgaaagaatggaagtaattaactagttcatggtttttcatacttgtaatatgc

SEQ ID NO: 2159 - DNA, 499 bp, Nicotiana tabacum
ggagaaataggaggggggaaattattagaaggagaagaagaagcacttttcataaaaggttcaagtgcttccattagttcaccaccagaagtaataggttctgatgttgagtgaacatctacaggtgtactattccaaaaatccattgctgctgccattacctaaaatacctgttcacaaaaaaagttaaaaaaagtaacctgtttcttgtcaaataaaagaaaacaggtgagtgattttgattacaaatatataaacagaaaaatggatatcaaagaggtcttcaaataacaacctcttttttctcctgtgattaaaaggaaaaaaaattcaacctttgagggacaactaataagccctctaagctgattttgaaagaaagaaaaaaaggtctgaaactatactgagttaattattactagatctcgattctgaaaacacctggcttataagaaaatatttcgtctaattaaaagcttgcattttctccatttctttg

SEQ ID NO: 2160 - DNA, 231 bp, Nicotiana tabacum
gtgtgagttattcttctttgtctttgccttgtaaacgtaggccattcgcttcccgaggtaccagtccacctcttccttagtgttcactccctcaatctgaatcagtgaagtacttggatactggttcgatttcgaccttttgtatccaagaacagttcccctgacgtatagcctgacacgttctccttggcgtcccttcaccattttcgaatcaaggggattggagctgcg

SEQ ID NO: 2161 - DNA, 508 bp, Nicotiana tabacum
acgagatatgacagctggcatcagactgcgggaaatactggcccccatgccgatattaatctgccctgccagttgcccttgtcgttggcgaatatcctcttgggctgcgcgcagctcttcaagaattagactggcgtgctgataaaaactttcaccggcatcagttaacgtcacgcctttactacggcgaaaaaagagttgcgccgctaacccttcttctagctcctgaatagatttactcagtgccggttgcgacatattcaacattcggctcgctccgcgaatgctgccctgacgagccacttcaacaaaagcccgaatttgatgaatctttacctgaaaagccatgacgccaccgataaccgttatttatcagaccaaagaaactggcatctactttaatgcagatgattgtgtcagggtaatttatgaacggttaaaactgtgaaaaatcagttagtgataagtaaaaactatcgctacgtgaaccgggtcacactttttactg

SEQ ID NO: 2162 - DNA, 521 bp, Nicotiana tabacum
gagaactacgacgaacgaggcatcgtatggcctgacgctatcgcgccgttccaggtggcgattctgccgatgaacatgcacaaatccttccgcgtacaagagcttgctgagaaactgtacagcgaactgcgtgcacaaggtatcgaagtgctgctggatgaccgcaaagagcgtccgggcgtgatgtttgctgatatggaactgatcggtattccgcacactattgtgctgggcgaccgtaacctcgacaacgacgatatcgaatataaatatcgtcgcaacggcgagaaacagttaattaagactggtgacatcgtcgaatatctggtgaaacagattaaaggctgatgccagaaagggtcctgaatttcagggccctttttttacatggattgtataaaatggataaaccaaaggcgtactgccgcctgtttctccccagctttcttttactttcggcttgtaccgttgatatcagccagccagacccatcagccacagcagtagatgccgaggcaaaa

SEQ ID NO: 2163 - DNA, 415 bp, Nicotiana tabacum
ctcctaagcttttcaagagttccaacttccctgtgctggatgtagctgctacttttgaagctccaaatacatgttttgcaacctgaattacaagggatccaacaccaccagcacctcccaaaacaagtatggatttgccagcagagaatccagctttctcaagaccttcataagcagtttcaattgctagaggaagactagcagcctctgcaaaactcagattcttgggtttcaaagcaactagtctctcttctacagcagtggactctgccaacgacccgaactgaatcgaattcccgcggccgccatggcggccgggagcatgcgacgtcgggcccaattcgccctatagtgagtcgtattacaattcactggccgtcgttttacaacgtcgtgactgggaaaaccctggcgt

SEQ ID NO: 2164 - DNA, 536 bp, Nicotiana tabacum
ttttccggtagctctgccagtttcaagataagagaaagcttccacaaccttatcaaatgggaatggtccttttgaatcaataactggtttcaccttcccattttctaagtatgggttcagtttcttcaacatctctccatttgatgtcactacaaatctaaaacctggtgctgttactgcccctgttagcactaccacacttccaccttctttcactgccttcaccgccttttcgccctgaccaactgtatcataaacgacatcaaacttctcaggaagatgttcaaaattctccttggtgtaatcaatagctaaatcaactcctaagcttttcaagagttccaacttccctgtgctggatgtagctgctacttttgaagctccaaatacatgttttgcaacctgaattacaagggatccaacaccaccagcacctcccaaaacaagtatggatttgccagcagagaatccagctttctcaagaccttcataagcagtttcaattgctagaggaagactagcagcctctgcaaaac

SEQ ID NO: 2165 - DNA, 178 bp, Nicotiana tabacum
tgtgagtgtgtgaagtgcaaagccgccgcgttcgagaactgggtgtccggcatttggttgaatggctggccagatagtgtaaggacagttgttaactagggttagaattaaaccagagtaagtggcttgagagagagcacaaagggttaaaaagagagagagtgaaagtaaagttttt

SEQ ID NO: 2166 - DNA, 480 bp, Nicotiana tabacum
agcatacggttttcccatactttaacctgcaccgattcgctaacctacgccatgagcatacttgacaagctttgggacgacaccgtcgccggtccccgtcccgatagtggccttggcaaactccgaaaatcttccacctttaacttgggctcaagttccggcaaggaaacagaaggaagtcaagaggtggctagggtgacaaaacgtataatgatagtaaagcctccaggatatgtgagtaaagactctcctccagtttcgcctgccagtgccggttccactcctccggtatctccctttgctggtgcgggaggaaaggaggcatttcgattccgcaggcgatcagggtcatttgcatacgagaatgctagtgggattggacccagaagccctcctcctccttacgacctgtgagttatgaatcgaggctcaacatgcatgtttcagctgcttgactctatatatgttacgtgtccgact

SEQ ID NO: 2167 - DNA, 287 bp, Nicotiana tabacum
agtggaaatgctaacaggtctacgggcactagacacaaaccgtccaagccaccagcataatctggttgaatggattaagccacatttatctgatagaaggaagttgaaggacaagatggattcacggctggaagggaaatatccatccagagctgcagtacaaatagcacaactggcactgtcatgtcttggacctgaacctaaaaccagaccatcaatgaaagaagtagtggagaaactggaacagattgaagctgtcaatgaaagacccaaggagcctagagtaa

SEQ ID NO: 2168 - DNA, 375 bp, Nicotiana tabacum
ctctggcaaaggaaagaatcttactgaccactttttcgtgtttgaacttggtaagttggagagaatatcttgtttaaatttgaatatactatcttctaatatgttaattataattatttgtatattaggttcaacatgtggtgcaccccatgaacgacatgatccacaggcattggctatcccaaacaaagattcgtcttaactaaatcttataccaacgcccactactaatctcttctcaacagtaatggtatagttgttttaactaatataaacaggttatagatcaacaagaataggtttggacattaaacaactgcccagtagtgcaagtattttaaaaacggtaccaaactgcaaatattatggtgcaaa

SEQ ID NO: 2169 - DNA, 410 bp, Nicotiana tabacum
ctgttcaaatcacagtaacagcatcttgtgctgccataataattactctagtggtgtgtatatggagagtgctgaattgggaatcactagtgaattcgcggccgcctgcaggtcgaccatatgggagagctcccaacgcgttggatgcatagcttgagtattctatagtgtcacctaaatagcttggcgtaatcatggtcatagctgtttcctgtgtgaaattgttatccgctcacaattccacacaacatacgagccggaagcataaagtgtaaagcctggggtgcctaatgagtgagctaactcacattaattgcgttgcgctcactgcccgctttccagtcgggaaacctgtcgtgccagctgcattaatgaatcggccaacgcgcggggagaggcggtttgcgtat

SEQ ID NO: 2170 - DNA, 469 bp, Nicotiana tabacum
gaaatcttttggaaattcattcaatacaatacgagtaatgtaatcattattattacagattattattcttctcaagtattccaatcacattttgattattgaaaatcatagatctaaaatcttgacttgacttgacttgacacagtctaatatagaaatgcaactttgcaggacaatccaattccaaacgttgatcaagtaacctgatctaggccttgacgtcttgaacaattgttgtaattgcaaatcctgtttggttagcacgatggacagtccctgctagtttattgtctgaaacattcagtagctgcaaatttccccagtagatgagcttcaagactgagattggaattttccctgataatttattaccgttcaatctcatccatcgcaaagatattaaattgccaagagatgatgggatagggccactcagcttgttattgtctaatcccaaactcactagcct

SEQ ID NO: 2171 - DNA, 371 bp, Nicotiana tabacum
tatctggaagaagagggcgcgaacaagagcagcaatacagaaactttcgtggcgatccgcgtcgacattgataactggcgctgggccggtgtgccattctacctgcgtactggtaaacgtctgccgaccaaatgttctgaagtcgtggtctatttcaaaacacctgaactgaatctgtttaaagaatcgtggcaggatctgccgcagaataaactgactatccgtctgcaacctgatgaaggcgtggatatccaggtactgaataaagttcctggccttgaccacaaacataacctgcaaatcaccaagctggatctgagctattcagaaacctttaatcagacgcatctggcggatgcctatgaacgttt

SEQ ID NO: 2172 - DNA, 230 bp, Nicotiana tabacum
gctgcttgctgcactctctctctcttggaaaatttgcaacaaagaaaaatgacgacggtggtccctacttcagaggaagatcccgtgctctccgtcgtccggtttacggcggagatgtcatggtctgacgccggcgccgatattgcagagcctcaagttaatagattgtgtgtcgaggcccaggaatgcattattgaaggaaggtggttggatttggcttcgttgatgct

SEQ ID NO: 2173 - DNA, 279 bp, Nicotiana tabacum
  misc_feature (201)..(201): n = a, t, c, or g
attttttctcttttcacaaatgccctcatttcttcttgtctctacactttctcttattcctaataatatctcactcttctcatgcccaaaactctcaacaagactattctcggatgcccataacacagctcgtgcagatgtaggcagtggaaccattaacttgggacaacggggtagcagcctatgcacaaaattatgttnctcaattggctgcagactgcaacctcttacattctcatggccaatacggcgaaaacctaactcagggaagtggcgatt

SEQ ID NO: 2174 - DNA, 610 bp, Nicotiana tabacum
  misc_feature (518)..(518): n = a, t, c, or g
cggcggcgacatcggtatccttatggagtacatgaacgtcggcacactagaaagtcttttaaaatcacaagcaactttctccgaacttagcttagcaaaaatcgctaagcaagtacttagcggactcgactacttacacaatcacaaaatcattcacagagatttaaaaccttcgaaccttctagtaaatcgcgagatggaagtaaaaatcgccgatttcggagtgagtaaaatcatgtgcaggactttagatccttgcaattcatacgttggaacttgtgcttatatgagcccagaaaggtttgatccagacacttatggagttaactacaacggttacgcagctgatatttggagtttgggcctgactttaatggaactatatatgggccactttccgttcttgccacctggacagagaccggactgggctacgctaatgtgcgccatatgcttcggtgagccgcccagtttgcctgaagggacgtcgggaaatttcagagattttatcgagtgtngtttacagaaagagtccagtaaaaggtggagcgctcagcaacttttgcaacatccgtttatactgagcatcgatttgaagtccacgtaaaaa

SEQ ID NO: 2175 - DNA, 430 bp, Nicotiana tabacum
cggcggcgacatcggtatccttatggagtacatgaacgtcggcacactagaaagtcttttaaaatcacaagcaactttctccgaacttagcttagcaaaaatcgctaagcaagtacttagcggactcgactacttacacaatcacaaaatcattcacagagatttaaaaccttcgaaccttctagtaaatcgcgagatggaagtaaaaatcgccgatttcggagtgagtaaaatcatgtgcaggactttagatccttgcaattcatacgttggaacttgtgcttatatgagcccagaaaggtttgatccagacacttatggagttaactacaacggttacgcagctgatatttggagtttgggcttgactttaatggaactatatatgggccactttccgttcttgccacccggacagatcctccgccca

SEQ ID NO: 2176 - DNA, 277 bp, Nicotiana tabacum
gtgctgcagttgctgttgctgctcccgctggtggtggtgctggtgctgcagcagctgcccctgctgcagaggaaaagaaggaagagcccaaggaagaaagtgatgacgacatggggttcagtctgtttgactaggagctcctttcagtatgatatttggttcctttttagagaattgatgaaacttggtaatagcaccctttataaggagatttttgatctgtttgtcacaattaaatgtaatcttgaggttatgatttatgaacatctgtcatgta

SEQ ID NO: 2177 - DNA, 475 bp, Nicotiana tabacum
ggggcgggggtgctgcgcaaaacgttagggcaacatatcatatatataacccgcagaatgttgggtgggatttgtatgcagttagtgcgtactgctcaacttgggatggtaacaagcctttggcatggaggaggaagtatggttggactgcattttgtggccctgttggacctcgtggccgagactcttgtggcaaatgcttaagggtgacaaatacaggcacaggagctcagaccacagtgagaatcgtggatcaatgcagcaatggcggactagacttggacgttatttcgttttccggcagctcgacacagacggaagagggaatcaacgtggccaccttattgtgaactacgagtttgttaattgtggtgacaatatgaatgttctggtatccccagttgacaaggaataaggagctatatatggccatgtttagtctttgacggcccaaataaaagtaaaaagaacgata

SEQ ID NO: 2178 - DNA, 458 bp, Nicotiana tabacum
ggggttgcgctaaacaggttaggcaacatatcatatatataacccgcagaatgttgggtgggatttgtatgcagttagtgcgtactgctcaacttgggatggtaacaagcctttggcatggaggaggaagtatggttggactgcattttgtggccctgttggacctcgtggccgagactcttgtggcaaatgcttaagggtgacaaatacaggcacaggagctcagaccacagtgagaatcgtggatcaatgcagcaatggcggactagacttggactgttaacgttttccggcagctcgacacagacggaagagggaatcaacgtggccaccttattgtgaactacgagtttgttaattgtggtgacaatatgaatgttctggtatccccagttgacaaggaataagaagctatatatggccatgtttagtctttgacggcccaaataaaagtaaaa

SEQ ID NO: 2179 - DNA, 444 bp, Nicotiana tabacum
attcccttttttgcggcattttgccttcctgtttttgctcacccagaaacgctggtgaaagtaaaagatgctgaagatcagttgggtgcacgagtgggttacatcgaactggatctcaacagcggtaagatccttgagagttttcgccccgaagaacgttttccaatgatgagcacttttaaagttctgctatgtggcgcggtattatcccgtattgacgccgggcaagagcaactcggtcgccgcatacactattctcagaatgacttggttgagtactcaccagtcacagaaaagcatcttacggatggcatgacagtaagagaattatgcagtgctgccataaccatgagtgataacactgcggccaacttacttctgacaacgatcggaggaccgaaggagctaaccgcttttttgcacaacatgggggatcatgtaact

SEQ ID NO: 2180 - DNA, 350 bp, Nicotiana tabacum
agtaggttccacgaaaagtccattgatgttaaaggacatgattttgagctttctgccatttggatgctgggagaagtgatgtgcccgggttataacttggggcttaatggtgattcaagctagcttagctaatcttatacatggatttaactggtcattgcctgataatatgactcctgaggacctcgacatggatgagatttttgggctctccacacctaaaaagtttccacttgctactgtgattgagccaagactttcacctaaactttactctgttctcgattcagcacttctgtggttccatcaacgatagactcattgtgttatgtcttgaactcgttgccttt

SEQ ID NO: 2181 - DNA, 351 bp, Nicotiana tabacum
gaaaaacaaaagcgatcggtatcttcctaaagttggggatagcttgccggactcagttgattggagagagaaaggtgttcttgttggagttaaggatcaaggaagctgtgggagctgttgggcattctctgcaattgcttccgttgaagcagtgaactcgatagtcaccggagatgtgatttcactatcggagcaagaactggtggattgtgatacttcctacaatgacggctgcaatggcggtcttatggactatgcctttgatttcatcatcaaaaatggaggaattgacactgaggaagactacccttacacaggccgtgatggcagatgtgaccagtcaaggaaaaa

SEQ ID NO: 2182 - DNA, 469 bp, Nicotiana tabacum
ctgataaacatcttcgatttgatccttaaaaaatttgcagcttcaaagatggaaaatggccaagaaaatcatgaaaacattcaaactgaagaaatcccagatgaatttcaatgctgtgtttgcctggaacttttgtataaaccagttgtgctagggtgtggccacattgcttgtttctggtgtatatttaagtccatgaatactttgatggagtcaaactgtcccatttgtcgtcacccttatcatcatttccctagtgtgtgtagattgatgcactttttgcttgtaaagttgtaccctttagacagtgcaagaagggaaaaacaagtggcagaggaggagaaggaagtaggatatttttcacctcagtttgatgattatttatcagaatcctgtggcaagaccgatcttgttctagacacggcttcacttcattccatcccttcacagaaatgtggatcagcagggg

SEQ ID NO: 2183 - DNA, 546 bp, Nicotiana tabacum
cagcacgatagaatgaccaagacgtcaattctcctgcctcaaacagtggcgctggtggtggctccttataatccttgtcactctgcgctgccgtcccaattgcctgcctctctgaatatttgtttgctcctaatcttacatcttcttctttgttctccattctttcctcgtgccgaattcctgcagcccgggggatccactagttctagagcggccgccaccgcggtggagctccagcttttgttccctttagtgagggttaattaagggcgaattttaacaaaattcagggcgcaagggctgctaaaggaagcggaacacgtagaaagccagtccgcagaaacggtgctgaccccggatgaatgtcagctactgggctatctggacaagggaaaacgcaagcgcaaagagaaagcaggtagcttgcagtgggcttacatggcgatagctagactgggcggttttatggacagcaagcgaaccggaattgccagctggggcgccctctggtaaggttgggaagccctgcaaagtaaactggatggc

SEQ ID NO: 2184 - DNA, 375 bp, Nicotiana tabacum
ctcagctacgctgcttgctgcactctgtctctctctctctccctctctcttggaaaatttgcaacaaagaaaaatgacgacggtggtccctacttcagaggaagatcccgtgctctccgtcgtccggtttacggcggagatgtcatggtctgacgccggcgccgatattgcagagcctcaagttaatagattgtgtgtcgaggcccaggaatgcattattgaaggaaggtggttggatttggcttcgttgatgctcacttccgcagatttaatattttctaaagcttctgaaaaagatcttgagtgcattttcactatcatttgcaaccttgtcaagaagcctgagagcttggaccaagtacatgagatggcaga

SEQ ID NO: 2185 - DNA, 228 bp, Nicotiana tabacum; identical to SEQ ID NO: 1383

SEQ ID NO: 2186 - DNA, 484 bp, Nicotiana tabacum
aaccaaccttccttttcttacttagtaaaatggatattcagtcttctcctttcaacttaattgctttgctactcttcatttcatttctttttatcctattgaaaaagtggaataccaaaatcccaaagttacctccaggtccatggagacttccccttattggcagcctccatcacttgaaaggtaaactcccacaccatcatcttagagatttagcccgaaaatatggacctctcatgtatttacaacttggagaagttcctgtagttgtaatatcttcgccacgtatagcaaaagctgtactaaaaactcatgatcttgcttttgcaacgaggcctcggttcatgtcctcggacattgtgttttacaaaagcagggacatatcattcgccccatatggcgattactggagacaaatgcgtaaaatattaacacaagaactcttgagtaacaagatgctcaagtcatttagcacaatccgaaa

SEQ ID NO: 2187 - DNA, 373 bp, Nicotiana tabacum
gagagagagagagagaggggataattgaaagtttaaaagtagtccaaaaatggaaggtgaaaaggaaaggattaaaatggcaagtgataagtacaggaaattcctgcatgaagaacaagctgcttactgcaggaagcatccattggagacatggtggccctcccatttatgacgctgttaatcatctctttgaacaaggaagaaccaaggtatgggcagaagggtctctggaagaaacagttcaaaatgctataaaatcatgggaaatggggctttctcacaagactcgcgttaaggactttaggaccattaaccctgaaaaattcaaactctttgttaatggaagagagggactatcagcagaagagacact

SEQ ID NO: 2188 - DNA, 496 bp, Nicotiana tabacum; identical to SEQ ID NO: 1702

SEQ ID NO: 2189 - DNA, 491 bp, Nicotiana tabacum
caagtcttcccatcatgtctacctcacataaacataatactcctcaaatggctgctatcacactcctaggattactacttgttgccagcagcattgacatagcaggggctcaatcgataggtgtttgctatggaatgttaggcaacaacttgccaaatcattgggaagttatacagctctacaagtcaagaaacataggaagactgaggctttatgatccaaatcatggagctttacaagcattaaaaggctcaaatattgaagttatgttaggacttcccaattcagatgtgaagcacattgcttccggaatggaacatgcaagatggtgggtacagaaaaatgttaaagatttctggccagatgttaagattaagtatattgctgttgggaatgaaatcagccctgtcactggcacatcttacctaacctcatttcttactcctgctatggtaaatatttacaaagcaattggtgaagctggtttggga

SEQ ID NO: 2190 - DNA, 371 bp, Nicotiana tabacum
aattgctggaagctagccatggggagaagacctgcaaggtgttaccgccagattaagaacaagccttacccaaaatcacggttttgccgtggtgtccctgatccaaagatcaggatctatgatgttggcatgaagaaaaagggagttgatgagtttcctttctgtgtacacttggtcagttgggagaaggagaatgtctcaagtgaggcacttgaagctgcccgtattgcttgcaacaagtacatgaccaagtctgctgggaaggatgcctttcaccttagggtcagggtccatcctttccatgttttgcgtattaataagatgttgtcatgtgctggagcggataggctccaaactggcatgaggggagc

SEQ ID NO: 2191 - DNA, 428 bp, Nicotiana tabacum; identical to SEQ ID NO: 1883

SEQ ID NO: 2192 - DNA, 485 bp, Nicotiana tabacum
ttttgtaacaaacatattagataatggcttttattcatacttaatacagcaagctctgaagtatgaaagagcattactattacagctttgccattacaaaggttttatatattacacgatgatcagtgttgaggcttcccttcagtcactttatccatggcctcacctttgtagtagcaacacctgctgcagccgtagtaattgcggcggccgcaacaaccatagcggcagtatcctccacgtccaccaccgcggccgccacctgggtatccaccacggccgccaccagggtatccaccgccaccacggccgccaccagggtatccgccgccagggtatccaccgccagggtagccaccaccggggtatccgccaccatattgagcttcatgcacttcattcttgttatcggatttctttgagtcctcttctgaagtggtggaagtctcagacaactccctagctaaaacctcagagcttatcat

SEQ ID NO: 2193 - DNA, 263 bp, Nicotiana tabacum
cggcggtggtggtggtatttttggtgcacttggaagtgtaagagacgcaattaaagacacattagcaccatctagtatgcgtgacactaccactacagatgagacgcgtaccggcggatcgaagatagtggtggatgtcgaggatactccggcggggagaaccgccgcgacgctgaaagtggccgatcagttgaccggccagacgtttaacgacgtcgagagaatggatgtggagggcattgccgaggttgaggccaaggata

SEQ ID NO: 2194 - DNA, 36 bp, Artificial Sequence
  Primer
tagctacgcggatccatgctttctcccatagaagcc

SEQ ID NO: 2195 - DNA, 35 bp, Artificial Sequence
  Primer
agtcaattatcttctacaaacctttatatattagc

SEQ ID NO: 2196 - protein, 83 aa, Nicotiana tabacum
EVLRLYPPGPLLVPHENVEDCVVSGYHIPKGTRLFANVMKLQRDPKLWSDPDTFDPERFIATDIDFRGQYYKYIPFGPGRRSC

SEQ ID NO: 2197 - protein, 83 aa, Nicotiana tabacum
EVLRLYPPGPLLVPHENVEDCVVSGYHIPKGTRLFANVMKLLRDPKLWPDPDTFDPERFIATDIDFRGQYYKYIPFGSGRRSC

SEQ ID NO: 2198 - protein, 83 aa, Nicotiana tabacum
EVLRLYPPGPLLVPHENVEDCVVSGYHIPKGTRLFANVMKLQRDPKLWSDPDTFDPERFIATDIDFRGQYYKYIPFGSGRRSC

SEQ ID NO: 2199 - protein, 83 aa, Nicotiana tabacum
EVLRLYPPGPLLVPHENVEDCVVSGYHIPKGTRLFANVMKLQRDPKLWSNPDKFDPERFFADDIDYRGQHYEFIPFGSGRRSC

SEQ ID NO: 2200 - protein, 83 aa, Nicotiana tabacum
KVLRLYPPGPLLVPHENVKDCVVSGYHIPKGTRLFANVMKLQRDPKLLSNPDKFDPERFIAGDIDFRGHHYEFIPSGSGRRSC

SEQ ID NO: 2201 - protein, 83 aa, Nicotiana tabacum
KVLRLYPPGPLLVPHENVKDCVVSGYHIPKGTRLFANVMKLQRDPKLLSNPDKFDPERFIAGDIDFRGHHYEFIPFGSGRRSC

SEQ ID NO: 2202 - protein, 83 aa, Nicotiana tabacum
KVLRLYPPGPLLVPHEYVKDCVVSGYHIPKGTRLFANVMKLQRDPKLLSNPDKFDPERFIAGDIDFRGHHYEFIPFGSGRRSC

SEQ ID NO: 2203 - protein, 85 aa, Nicotiana tabacum
ETLRLYPPVPFLLPHEAVQDCKVTGYHIPKGTRLYINAWKVHRDPEIWSEPEKFMPNRFLTSKANIDARGQNFEFIPFGSGRRSC

SEQ ID NO: 2204 - protein, 85 aa, Nicotiana tabacum; identical to SEQ ID NO: 2203

SEQ ID NO: 2205 - protein, 85 aa, Nicotiana tabacum
ETLRLFPPVPFLLPHEAVQDCKVTGYHIPKGTRLYINAWKVHRDPEIWSEPEKFMPNRFLTSKANIDARGQNFEFIPFGSGRRSC

SEQ ID NO: 2206 - protein, 85 aa, Nicotiana tabacum; identical to SEQ ID NO: 2205

SEQ ID NO: 2207 - protein, 85 aa, Nicotiana tabacum
ETLRLYPPVPFLLPHEAVQDCKVTGYHIPKGTRLYINAWKVHRDSEIWSEPEKFMPNRFLTSKANIDARGQNFEFIPFGSGRRSC

SEQ ID NO: 2208 - protein, 81 aa, Nicotiana tabacum
ETFRMYPAGPLLVPHESSEETTVGGYRVPGGTMLLVNLWAIHNDPKLWDEPRKFKPERFEGLEGVRDGYKMMPFGSGRRSC

SEQ ID NO: 2209 - protein, 81 aa, Nicotiana tabacum
ETFRMYPAGPLLVPHESSEETTVGGYRVPGGTMLLVNLWAIHNDPKLWDEPRKFKPERFQGLDGVRDGYKMMPFGSGRRSC

SEQ ID NO: 2210 - protein, 83 aa, Nicotiana tabacum
ETMRLYTPIPLLLPHYSTKDCIVEGYDVPKHTMLFVNAWAIHRDPKVWEEPDKFKPERFEATEGETERFNYKLVPFGMGRRAC

SEQ ID NO: 2211 - protein, 83 aa, Nicotiana tabacum; identical to SEQ ID NO: 2210

SEQ ID NO: 2212 - protein, 83 aa, Nicotiana tabacum; identical to SEQ ID NO: 2210

SEQ ID NO: 2213 - protein, 83 aa, Nicotiana tabacum
ETMRLHPVAPMLVPRECREDIKVAGYDVQKGTRVLVSVWTIGRDPTLWDEPEVFKPERFHEKSIDVKGHDYELLPFGAGRRMC

SEQ ID NO: 2214 - protein, 83 aa, Nicotiana tabacum; identical to SEQ ID NO: 2213

SEQ ID NO: 2215 - protein, 83 aa, Nicotiana tabacum
ETMRLHPVAPMLVPRECREDIKVAGYDVQKGTRVLVSVWTIGRDPTLWDEPEVFKPERFHERSIDVKGHDYELLPFGAGRRMC

SEQ ID NO: 2216 - protein, 83 aa, Nicotiana tabacum
EALRLHPPTPLMLPHRASASVKIGGYDIPKGSIVHVNVWAVARDPAVWKNPLEFRPERFLEEDVDMKGHDYRLLPFGAGRRVC

SEQ ID NO: 2217 - protein, 83 aa, Nicotiana tabacum
EALRLHPPTPLMLPHKASASVKIGGYDIPKGSIVHVNVWAVARDPAVWKNPLEFRPERFLEEDVDMKGHDYRLLPFGAGRRVC

SEQ ID NO: 2218 - protein, 83 aa, Nicotiana tabacum
ETLRLHPLGTMLAPHCAIEDCNVAGYDIQKGTTFLVNVWTIGRDPKYWDRAQEFLPERFLENDIDMDGHNFAFLPFGSGRRRC

SEQ ID NO: 2219 - protein, 83 aa, Nicotiana tabacum
ETLRLHPLGTMLAPHCAIEDCNVAGYDIQKGTTVLVNVWTIGRDPKYWDRAQEFLPERFLENDIDMDGHNFAFLPFGSGRRRC

SEQ ID NO: 2220 - protein, 83 aa, Nicotiana tabacum; identical to SEQ ID NO: 2219

SEQ ID NO: 2221 - protein, 83 aa, Nicotiana tabacum
EVLRLYPAGYVINRMVNKETKLGNLCLPAGVQLVLPTMLLQHDTEIWGDDAMEFNPERFSDGISKATKGKLVFFPFSWGPRIC

SEQ ID NO: 2222 - protein, 83 aa, Nicotiana tabacum; identical to SEQ ID NO: 2221

SEQ ID NO: 2223 - protein, 83 aa, Nicotiana tabacum
EVLRLYPAGYAINRMVTKETKLGNLCLPAGVQLLLPTILLQHDTEIWGDDAMEFNPERFSDGISKATKGKLVFFPFSWGPRIC

SEQ ID NO: 2224 - protein, 83 aa, Nicotiana tabacum
ESLRLYPPIATRTRRTNEETKLGELDLPKGALLFIPTILLHLDKEIWGEDADEFNPERFSEGVAKATKGKMTYFPFGAGPRKC

SEQ ID NO: 2225 - protein, 83 aa, Nicotiana tabacum
ESLRLYPPIATRTRRTNEETKLGELDLPKGALLFIPTILLHLDREIWGEDADEFNPERFSEGVAKATKGKMTYFPFGAGPRKC

SEQ ID NO: 2226 - protein, 83 aa, Nicotiana tabacum
ETLRMHPPIPLLVPRECMEDTKIDGYNIPFKTRVIVNAWAIGRDPESWDDPESFMPERFENSSIDFLGNHHQFIPFGAGRRIC

SEQ ID NO: 2227 - protein, 83 aa, Nicotiana tabacum; identical to SEQ ID NO: 2226

SEQ ID NO: 2228 - protein, 83 aa, Nicotiana tabacum; identical to SEQ ID NO: 2226

SEQ ID NO: 2229 - protein, 83 aa, Nicotiana tabacum
ETLRMHPPIPLLVPRECMEDTKIDGYNIPFKTRVIVNAWAIGRDPQSWDDPESFTPERFENNSIDFLGNHHQFIPFGAGRRIC

SEQ ID NO: 2230 - protein, 83 aa, Nicotiana tabacum; identical to SEQ ID NO: 2229

SEQ ID NO: 2231 - protein, 83 aa, Nicotiana tabacum
ETLRMHPPVPLLGPRECRDQTEIDGYTVPIKARVMVNAWAIGRDPESWEDPESFKPERFENTSVDLTGNHYQFIPFGSGRRMC

SEQ ID NO: 2232 - protein, 83 aa, Nicotiana tabacum; identical to SEQ ID NO: 2231

SEQ ID NO: 2233 - protein, 83 aa, Nicotiana tabacum; identical to SEQ ID NO: 2231

SEQ ID NO: 2234 - protein, 83 aa, Nicotiana tabacum
ETLRMHPPVPLLGPRECREQTEIDGYTVPLKARVMVNAWAIGRDPESWEDPESFKPERFENISVDLTGNHYQFIPFGSGRRMC

SEQ ID NO: 2235 - protein, 83 aa, Nicotiana tabacum; identical to SEQ ID NO: 2234

SEQ ID NO: 2236 - protein, 83 aa, Nicotiana tabacum; identical to SEQ ID NO: 2234

SEQ ID NO: 2237 - protein, 83 aa, Nicotiana tabacum
ETLRLHPPTPLLVPRECREETEIEGFTIPLKSKVLVNVWAIGRDPENWKNPECFIPERFENSSIEFTGNHFQLLPFGAGRRIC

SEQ ID NO: 2238 - protein, 83 aa, Nicotiana tabacum; identical to SEQ ID NO: 2237

SEQ ID NO: 2239 - protein, 83 aa, Nicotiana tabacum
ETLRLHPPVPLLLPRECREETNINGYTIPVKTKVMVNVWALGRDPKYWNDAETFMPERFEQCSKDFVGNNFEYLPFGGGRRIC

SEQ ID NO: 2240 - protein, 83 aa, Nicotiana tabacum; identical to SEQ ID NO: 2239

SEQ ID NO: 2241 - protein, 83 aa, Nicotiana tabacum; identical to SEQ ID NO: 2239

SEQ ID NO: 2242 - protein, 83 aa, Nicotiana tabacum; identical to SEQ ID NO: 2239

SEQ ID NO: 2243 - protein, 83 aa, Nicotiana tabacum
ETLRLHPPVPLLLPRECREETNINGYTIPVKTKVMVNVWALGRDPKYWDDAETFKPERFEQCSKDFVGNNFEYLPFGGGRRIC

SEQ ID NO: 2244 - protein, 83 aa, Nicotiana tabacum
ETLRLHPPIPLLLHETAEESTVSGYHIPAKSHVIINSFAIGRDKNSWEDPETYKPSRFLKEGVPDFKGGNFEFIPFGSGRRSC

SEQ ID NO: 2245 - protein, 83 aa, Nicotiana tabacum; identical to SEQ ID NO: 2244

SEQ ID NO: 2246 - protein, 83 aa, Nicotiana tabacum
EIFRLYPPAPLLVPRESMEKTILEGYEIRPRTIVHVNAWAIARDPEIWENPDEFIPERFLNSSIDYKGQDFELLPFGAGRRGC

SEQ ID NO: 2247 - protein, 83 aa, Nicotiana tabacum; identical to SEQ ID NO: 2246

SEQ ID NO: 2248 - protein, 83 aa, Nicotiana tabacum; identical to SEQ ID NO: 2246

SEQ ID NO: 2249 - protein, 83 aa, Nicotiana tabacum
EIFRLYPPAPLLVPRESMEKTILEGYEIRPRTIVHVNAWAIARDPEIWENPDEFIPERFLNSSTDYKGQDFELLPFGAGRRGC

SEQ ID NO: 2250 - protein, 85 aa, Nicotiana tabacum
EALRLRMAIPLLVPHMNLHDAKLGGFDIPAESKILVNAWWLANNPAHWKKPEEFRPERFFEEEKHVEANGNDFRYLPFGVGRRSC

SEQ ID NO: 2251 - protein, 85 aa, Nicotiana tabacum
EALRLRMAIPLLVPHMNLHDAKLGGLDIPAESKILVNAWWLANNPAHWKKPEEFRPERFFEEEKHVEANGNDFRYLPFGVGRRSC

SEQ ID NO: 2252 - protein, 85 aa, Nicotiana tabacum
ETLRLRMAIPLLVPHMNLHDAKLGGFDIPAESKILVNAWWLANNPAHWKKPEEFRPERFFEEEKHVEANGNDFRYLPFGVGRRSC

SEQ ID NO: 2253 - protein, 82 aa, Nicotiana tabacum
ESLRLYSPVVSLIRRPNEDAILGNVSLPEGVLLSLPVILLHHDEEIWGKDKKFNPERFRDGVSSATKGQVTFFPFTWGPRIC

SEQ ID NO: 2254 - protein, 83 aa, Nicotiana tabacum
ESLRLYPPVVTLTRRPKEDTVLGDVSLPAGVLISLPVILLHHDEEIWGKDAKKFKPERFRDGVSSATKGQVTFFPFTWGPRIC

SEQ ID NO: 2255 - DNA, 18 bp, Nicotiana tabacum
  misc_feature (4)..(6): n = deoxyinosine
  misc_feature (9)..(9): n = deoxyinosine
  misc_feature (15)..(15): n = deoxyinosine
ttynnnccngarmgntty

SEQ ID NO: 2256 - DNA, 20 bp, Nicotiana tabacum
  misc_feature (3)..(3): n = deoxyinosine
  misc_feature (6)..(6): n = deoxyinosine
  misc_feature (9)..(9): n = deoxyinosine
  misc_feature (10)..(12): n = deoxyinosine
  misc_feature (18)..(18): n = deoxyinosine
ggnmgnmgnnnntgyccngs

SEQ ID NO: 2257 - DNA, 17 bp, Nicotiana tabacum
ttyaarcctgagagatt

SEQ ID NO: 2258 - DNA, 15 bp, Nicotiana tabacum
ccagaragattcttg

SEQ ID NO: 2259 - DNA, 17 bp, Nicotiana tabacum
ggrmgrmgratgtgycc

SEQ ID NO: 2260 - DNA, 19 bp, Nicotiana tabacum
  misc_feature (19)..(19): n = a, t, c, or g
ttttttttttttttttttn

SEQ ID NO: 2261 - DNA, 20 bp, Nicotiana tabacum
attatgctgagtgatatccc

SEQ ID NO: 2262 - DNA, 18 bp, Nicotiana tabacum
atttaggtgacactatag

SEQ ID NO: 2263 - DNA, 452 bp, Nicotiana tabacum
cggcctcgagtctagtgtttcaaagatgaagcttacttcccagtgaatcttttggccttcttcaccatagcatctctggtcactacagctgtttgtaaaatgttgagtgcctaagatcgaattttataaccaaccctgagccatgaaaggagtcatttgttcgtggaagctagcttcaagtgattcaatgtatagctaatccttcaacaagacatttgtggtaccaaacatgtatatttatgctgtcccatagaagagagtacaaaagaagcaagcttgcaaattaaataggtttagggccctttatctcctccgctttcacccttttggggatggaggttgaggttgttgtacagtgaacaatgaactgaaaatattgcagatactgttgattaaacaatctgagatgacagcacatttcttttctatattttgcttcttcgactgcaaaa

SEQ ID NO: 2264 - DNA, 405 bp, Nicotiana tabacum
gtaagatgtccaagtcattgggaaatgttattgatcctcttgaagttattaatggaattgaacttgctggacttcataagagattaaaggagggtaacctggacgccaaagaatttgagagggcaaaagagggacaggcaaaggactttcctagtggtattcctgaatgtggtgcagatgctcttcgatttgccctagtctcatacactgcccagtccgataagatcaatctggatattcaaagagtggttgggtatcgtcaatggtgtaacaaactgtggaatgccattaggtttgccatgagtaaactgggtgaagattacacccctccaacaaagatagttcctcgtgaaatgccttttagctgccaatggatactctcagcacttaacaaggccattgcga

SEQ ID NO: 2265 - protein, 7 aa, Artificial Sequence
  conserved p450 motif
  MISC_FEATURE (2)..(2): Xaa = any amino acid
  MISC_FEATURE (4)..(4): Xaa = any amino acid
  MISC_FEATURE (6)..(6): Xaa = any amino acid
  MISC_FEATURE (7)..(7): Xaa = gly or ala
GXRXCXX

SEQ ID NO: 2266 - protein, 21 aa, Artificial Sequence
  artificially synthesized peptide
DIDGSKSKLVKAHRKIDEILG

SEQ ID NO: 2267 - protein, 22 aa, Artificial Sequence
  Artificially synthesized peptide
FKNNGDEDRHFSQKLGDLADKY

SEQ ID NO: 2268 - protein, 6 aa, Artificial Sequence
  conserved p450 motif
  MISC_FEATURE (2)..(2): Xaa = any amino acid
FXPERF

SEQ ID NO: 2269 - protein, 7 aa, Artificial Sequence
  conserved p450 motif
  MISC_FEATURE (4)..(4): Xaa = any amino acid
  MISC_FEATURE (7)..(7): Xaa = ala or gly
GRRXCPX

SEQ ID NO: 2270 - protein, 509 aa, Nicotiana tabacum
MEGTNLTTYAAVFLGTLFLLFLSKLLRQRKLNLPPGPKPWPIIGNLNLIGNLPYRSIHELSLKYGPVMQLQFGSFPVVVGSSVEMAKIFLKSMDINFVGRPKTAAGKYTTYNYSDITWSPYGPYWRQARRMCLTELFSTKCLDSYEYIRAEELHSLLHNLNKISGKPIVLKDYLTTLSLNVISRMVLGKRYLDESENSFVNPEEFKKMLDELFLLNGVLNIGDSIPWIDFMDLQGYVKRMKVVSKKFDKFLEHVIDEHNIRRNGVENYVAKDMEDVLLQLADDPKLEVKLERHGVKAFTQDMLAGGTESSAVTVEWAISELSKKPEIFKKATEELDRVIGQNRWVQEKDIPNLPYIEAIVKETMRLHPVAPMKATECRENSKVAGYDVQKGTRVLVSVWTIGRDPTLWDEPEVFKPERFHEKASIDVKGHDYELLPFGVGRRMCPGYSLGLKVIQASLANLLHGFNWSLPDNMTPEDLNMDEIFGLSTPKKFPLATVIEPRLSPKLYSV

SEQ ID NO: 2271 - protein, 509 aa, Nicotiana tabacum
MEGTNLTTYAAVFLGTLFLLLLSKFLRQRKLNLPPGPKPWPIIGNLNLIGNLPHRSIHELSLKYGPIMQLQFGTFPVVVGSSVEMAKVFLKSMDINFVGRPKTAAGKYTTYNYSDITWSPYGPYWRQARRMCLMELFSTKRLDSYEYIRAEELHSLLHNLNKISGKPIVLKDYLTTLSLNVISRMVLGKRYLDESENSIVTPEEFKKMLDELFLLNGVLNIGDSIPWIDFMDLQGYVKRMKFVSKKFDKFLEHVIDEHNVRRNGVENYIAKDMVDVLLQLADDPTLEVKLERHGVKAFTQDMLAGGTESSAVTVEWAISELLKKPEIFKKATEELDRVIGQNRWVQEKDIPNLPYIEAIVKETMRLHPVAPMLVPRECREDCKVAGYDVKKGTRVLVSVWTIGRDPTLWDEPEAFKPERFHEKSIDVKGHDFELLPFGAGRRMCPGYNLGLKVIQASLANLIHGFNWSLPDNMTPEDLDMDEIFGLSTPKKFPLATVIEPRLSPKLYSV

SEQ ID NO: 2272 - protein, 473 aa, Nicotiana tabacum
MQFFSLVSIFLFLAFLFLLRKWKNSNSQSKKLPPGPWKIPILGSMLHMIGGEPHHVLRDLAKKYGPLMHLQLGEISAVVVTSRDMAKEVLKTHDVVFASRPKIVAMDIICYNQSDIAFSPYGDHWRQMRKICVMELLNAKNVRSFSSIRRDEVVRLIDSIRSDSSSGELVNFTQRIIWFASSMTCRSAFGQVLKGQDIFAKKIREVIGLAEGFDVVDIFPTYKFLHVLSGMKRKLLNAHLKVDAIVEDVINEHKKNLAAGKSNGALEDMFAAGTETSSTTTVWAMAEMMKNPSVFTKAQAEVREAFRDKVSFDENDVEELKYLKLVIKETLRLHPPSPLLVPRECREDTDINGYTIPAKTKVMVNVWALGRDPKYWDDAESFKPERFEQCSVDFFGNNFEFLPFGGGRRICPGMSFGLANLYLPLAQLLYHFDWKLPTGIMPRDLDLTELSGITIARKGDLYLNATPYQPSRE

SEQ ID NO: 2273 - protein, 7 aa, Artificial Sequence
  conserved p450 motif
  MISC_FEATURE (2)..(2): Xaa = any amino acid
  MISC_FEATURE (4)..(4): Xaa = any amino acid
  MISC_FEATURE (7)..(7): Xaa = ala or gly
GXRXCPX

SEQ ID NO: 2274 - protein, 7 aa, Artificial Sequence
  conserved p450 motif
  MISC_FEATURE (1)..(1): Xaa =  Glu or Lys
  MISC_FEATURE (2)..(2): Xaa =  any amino acid
  MISC_FEATURE (3)..(3): Xaa =  any amino acid
  MISC_FEATURE (5)..(5): Xaa =  any amino acid
  MISC_FEATURE (6)..(6): Xaa =  any amino acid
  MISC_FEATURE (7)..(7): Xaa =  Pro, Thr, Ser or Met
XXXRXXX

SEQ ID NO: 2275 - protein, 6 aa, Artificial Sequence
  conserved p450 motif
  MISC_FEATURE (2)..(2): Xaa =  any amino acid
  MISC_FEATURE (5)..(5): Xaa =  any amino acid
PXRFXF

SEQ ID NO: 2276 - protein, 5 aa, Artificial Sequence
  conserved p450 motif
  MISC_FEATURE (2)..(2): Xaa =  any amino acid
  MISC_FEATURE (4)..(4): Xaa =  any amino acid
GXRXC

SEQ ID NO: 2277 - protein, 519 aa, Nicotiana tabacum
MYHLLSPIEAIVGLVTFAFLLYLLWTKKQSKILNPLPPKIPGGWPVIGHLFYFNNNGDDDRHFSQKLGDLADKYGPVFTFRLGFRRFLAVSSYEAMKECFSTNDIHFADRPALLYGEYLCYNNAMLAVAKYGPYWKKNRKLVNQELLSVSRLEKFKHVRFSIVQKNIKQLYNCDSPMVKINLSDWIDKLTFDIILKMVVGKTYNNGHGEILKAAFQKFMVQAMEIELYDVFHIPFFKWLDLTGNIKAMKQTFKDIDNIIQGWLDEHIKKRETKDVGGENEQDFIDVLLSKRSNEHLGDGYSHDTTIKATVFTLVLDATDTLALHIKWVMALMINNKNVMKKAQEEMDTIVGRDRWVEENDIKNLVYLQAIVKEVLRLHPPAPLSVQHLSVKDCVVNGYHIPKGTALLTNIMKLQRDPQIWVDPDTFDPERFLTTNAAIDYRGQHYELIPFGSGRRACPAMNYSLQVEHLSIAHLIQGFNFATTTNEPLDMKQGVGLTLPKKTDVEVLITPRLPPTLYQY

SEQ ID NO: 2278 - protein, 473 aa, Nicotiana tabacum; identical to SEQ ID NO: 2272

SEQ ID NO: 2279 - protein, 509 aa, Nicotiana tabacum; identical to SEQ ID NO: 2271

SEQ ID NO: 2280 - DNA, 36 bp, Artificial Sequence
  primer
ggctctagataaatctcttaagttactaggttctaa

SEQ ID NO: 2281 - DNA, 44 bp, Artificial Sequence
  primer
ggctctagaagtcaattatcttctacaaacctttatatattagc

SEQ ID NO: 2282 - DNA, 27 bp, Artificial Sequence
  primer
ctctattgatactagctggttttggac

SEQ ID NO: 2283 - DNA, 26 bp, Artificial Sequence
  Primer
ggagggagagtataacttacggattc

SEQ ID NO: 2284 - DNA, 26 bp, Artificial Sequence
  Primer
agtaaccgattgctcacgttatcctc

SEQ ID NO: 2285 - DNA, 25 bp, Artificial Sequence
  Primer
ctctattcaaccccacacgtaactg

SEQ ID NO: 2286 - DNA, 27 bp, Artificial Sequence
  Primer
ctaaactctggtctgatcctgatactt

SEQ ID NO: 2287 - DNA, 27 bp, Artificial Sequence
  Primer
ctatacgtaaggtaaatcctgtggaac

SEQ ID NO: 2288 - DNA, 18 bp, Artificial Sequence
  Primer
tctctaaagtccccttcc

SEQ ID NO: 2289 - DNA, 18 bp, Artificial Sequence
  Primer
ccagcattcctcaatttc

SEQ ID NO: 2290 - DNA, 36 bp, Artificial Sequence; identical to SEQ ID NO: 2280
  Primer

SEQ ID NO: 2291 - DNA, 44 bp, Artificial Sequence; identical to SEQ ID NO: 2281
  Primer

SEQ ID NO: 2292 - DNA, 31 bp, Artificial Sequence
  Primer
gcccatcctacagttacctataaaaaggaag

SEQ ID NO: 2293 - DNA, 27 bp, Artificial Sequence
  Primer
accaagatgaaagatcttaggttttaa

SEQ ID NO: 2294 - DNA, 16 bp, Artificial Sequence
  Primer
ctgatcgtgaagatga

SEQ ID NO: 2295 - DNA, 17 bp, Artificial Sequence
  Primer
tgctgcatccaagacca

SEQ ID NO: 2296 - DNA, 17 bp, Artificial Sequence
  Primer
gggctatatggattcgc

SEQ ID NO: 2297 - DNA, 64 bp, Artificial Sequence
  Primer
ctggatcacaattgttagtgatggtgatggtgatgcgatcctctataaagctcaggtgccaggc

SEQ ID NO: 2298 - protein, 281 aa, Nicotiana Tabacam
IDKLSGLTYRLERNFKDLDNFYEELIEQHQNPNKPKYMEGDIVDLLLQLKKEKLTPLDLTMEDIKGILMNVLVAGSDTSAAATVWAMTALIKNPKAMEKVQLEIRKSVGKKGIVNEEDVQNIPYFKAVIKEIFRLYPPAPLLVPRESMEKTILEGYEIRPRTIVHVNAWAIARDPEIWENPDEFIPERFLNSSIDYKGQDFELLPFGAGRRGCPGIALGVASMELALSNLLYAFDWELPYGVKKEDIDTNVRPGIAMHKKNELCLVPKKLFINYIGTWISC

SEQ ID NO: 2299 - protein, 101 aa, Nicotiana Tabacam
RDPKLWPNPDNFDPERFIAADIDFRGQHYEYIPFGSGRRSCPGMTYALQAEHLTMAHLIQGFNYRTPTNEPLDMKEGAGITIRKVNPVEVLIKPRLAPELY

SEQ ID NO: 2300 - protein, 473 aa, Nicotiana Tabacam
MEFFSLVSIFLFLSFLFLLRKCKNSNSQTKQLPPGPWKIPILGSMLHMLGGEPHHILRDLAKKYGPIMHLQFGEISAVVVTSREMAKEVLKTHDVVFASRPKIVAMDIICYNQSDIAFSPYGDHWRQMRKICVMELLNAKNVRSFSSIRRDEVVRLIDSIRSDSSSGELVNFTQRIIWFASSMTCRSAFGQVLKGQDVFAKKIREVIGLAEGFDVADIFPSYKFLHVLSGMKRKLLNAHLKVDAIVEDVINEHKKNLATGKTNGALGDMFAAGTETSSTTTVWAMAEMMKNPNVFNKAQAEVRETFKDKVTFDEIDAEELEYLKLVIKETLRLHPPSPLLVPRECREDTDINGYTIPAKTKVMVNVWALGRDPKYWDDAESFKPERFEQCSVDFFGNNFEFLPFGGGRRICPGMSFGLANLYLPLAQLLYHFDWKLPSGMMPGDLDLTELAGITIARKGDLYLMATPYQPSRE
